(19) United States
(12) Patent Application Publication
(10) Pub. No.: US 2024/0368661 A1
(43) Pub. Date: Nov. 7, 2024

(54) COMPOSITIONS AND METHODS FOR PRODUCING REBAUDIOSIDE D

(71) Applicant: Arzeda Corp., Seattle, WA (US)

(72) Inventors: Kyle Eugene ROBERTS, San Marcos, CA (US); Alexandre ZANGHELLINI, Ithaca, NY (US); Daniela GRABS, Seattle, WA (US); Niklas Dalgas KRISTIANSEN, Redmond, WA (US); James J. HAVRANEK, Seattle, WA (US); Yih-En Andrew BAN, Shoreline, WA (US); Ashwini DEVKOTA, Shoreline, WA (US); Mark NANCE, Sammamish, WA (US)

(21) Appl. No.: 18/546,881

(22) PCT Filed: Feb. 17, 2022
(86) PCT No.: PCT/US2022/016820

§ 371 Date: Aug. 17, 2023

Related U.S. Application Data
(60) Provisional application No. 63/150,515, filed on Feb. 17, 2021.

(51) Int. Cl. C12P 19/56; C12N 9/10

(52) U.S. Cl. CPC C12P 19/56; C12N 9/1062; C12Y 204/01013

(57) ABSTRACT

The present disclosure provides enzymes and a method to use those enzymes to transfer a sugar moiety to a substrate steviol glycoside. Specifically, designed beta-1,2-glycosyltransferases and sucrose synthases are used in a one-pot reaction to convert stevioside and Reb A into Reb E and Reb D.

### CROSS-REFERENCE TO RELATED APPLICATIONS

[0001] This application claims the benefit of U.S. Provisional Patent Application No. 63/150,515, filed Feb. 17, 2021, the content of which is herein incorporated by reference in its entirety.

### INCORPORATION OF THE SEQUENCE LISTING

[0002] The contents of the text file submitted electronically herewith are incorporated herein by reference in their entirety: A computer readable format copy of the Sequence Listing (filename: ARZE_034_01WO_SeqList_ST25.txt, date recorded: Feb. 17, 2022, file size ˜6.84 megabytes).

### FIELD OF THE DISCLOSURE

[0003] The present disclosure relates to enzymes and biocatalytic processes for producing steviol glycosides. The present disclosure particularly relates to use of glycosyltransferases that can transfer a glucose moiety from an ADP-glucose sugar donor to steviol glycosides.

### BACKGROUND

[0004] Excess sugar consumption has been linked to worldwide health epidemics including diabetes and heart disease. Healthcare systems incur exorbitant costs associated with treating these diseases. Replacing added sugar in food with a low calorie, high-intensity sweetener would have significant health and economic impact.

[0005] The species Stevia rebaudiana is commonly grown for its sweet leaves, which have traditionally been used as a sweetener. Stevia extract is 200-300 times sweeter than sugar and is used commercially as a high intensity sweetener. The main glycoside components of stevia leaf are steviosides and rebaudiosides. Over ten different steviol glycosides are present in appreciable quantities in the leaf. The principal sweetening compounds are stevioside and rebaudioside A. Rebaudioside A (Reb A) is considered a higher value compared to stevioside because of its increased sweetness and decreased bitterness.

[0006] The sweetness and bitterness profile of rebaudioside D (Reb D) is improved compared to Reb A, but Reb D is present at very low quantities in the stevia leaf. Reb D can be made by the addition of a single glucose molecule to Reb A. Native glycosyltransferases that make Reb D use UDP-glucose as the glucose source for transferring to Reb A.

### BRIEF SUMMARY

[0007] The present disclosure provides enzymes, particularly non-natural enzymes, and methods to use those enzymes to transfer a sugar moiety to a substrate steviol glycoside (also referred to herein as a “SG”). Specifically, a beta-1,2-glycosyltransferase (also referred to herein as a “B12GT”) and sucrose synthase (also referred to herein as a “SuSy”) are used in a one-pot reaction to convert stevioside and Reb A into rebaudioside E (Reb E) and Reb D, respectively.

[0008] In contrast to native glycosyltransferases, the disclosure provides glycosyltransferase polypeptides that can utilize ADP-glucose as the sugar donor to convert Reb A to Reb D. The disclosure provides glycosyltransferase polypeptides that comprise an amino acid sequence that is at least 60%, at least 65%, at least 70%, at least 75%, at least 80%, at least 85%, at least 90%, at least 95%, at least 98%, at least 99%, or 100% identical to an amino acid sequence selected from the group consisting of SEQ ID NOs: 6-882 and 1333-1466. The glycosyltransferase polypeptide may comprise, or consist of, an amino acid sequence selected from the group consisting of SEQ ID NOs: 6-882 and 1333-1466. The polypeptides may comprise one or more peptide tags used for solubility, expression and/or purification; for example, a polyhistidine tag of between 4 and 10 histidine residues, and preferably 6 histidine residues. Other suitable tags include, but are not limited to, glutathione S-transferase (GST), FLAG, maltose binding protein (MBP), calmodulin binding peptide (CBP), and Myc tag. Suitable linkers include, but are not limited to, polypeptides composed of glycine and serine, such as GSGS, polyglycine linkers, EAAAK repeats, and sequences containing cleavage sites for enzymes such as factor Xa, enterokinase, and thrombin.

[0009] Nucleotide sugar donors, including both UDP-glucose and ADP-glucose, are expensive co-substrates and add significant costs to any process that utilizes the compounds. Sucrose synthases (SuSy; EC 2.4.1.13) catalyze the chemical reaction of nucleotide diphosphate (NDP) and sucrose to form NDP-glucose and fructose. Therefore, sucrose synthases can be used to convert an NDP into an NDP-glucose required by B12GTs (an exemplary glycosyltransferase). The disclosure provides SuSy polypeptides that comprise an amino acid sequence that is at least 60%, at least 65%, at least 70%, at least 75%, at least 80%, at least 85%, at least 90%, at least 95%, at least 98%, at least 99%, or 100% identical to an amino acid sequence selected from the group consisting of SEQ ID NOs: 890-1227 and 1231-1332. Specifically, the disclosed sucrose synthases can convert ADP into the ADP-glucose cofactor required by the disclosed B12GTs.

[0010] The disclosure additionally provides a method to utilize a SuSy ADP-glucose recycling system combined with a B12GT polypeptide in a one-pot reaction to convert Reb A and/or stevioside into Reb D and Reb E, respectively. In some embodiments, the method comprises contacting a stevia leaf extract purified to contain greater than 50% Reb A (RA50), ADP, and sucrose with a B1,2 glycosyltransferase and sucrose synthase to make Reb D and/or Reb E.

### BRIEF DESCRIPTION OF THE DRAWINGS

[0011] The accompanying drawings are included to provide a further understanding of the disclosure. The drawings illustrate embodiments of the disclosure and together with the description, serve to explain the principles of the embodiments of the disclosure.

[0012] FIG. 1 shows the conversion (glycosylation) of rebaudioside A (Reb A) to rebaudioside D (Reb D).

[0013] FIG. 2 shows the measured Reb A to Reb D activity of three native UDP-glucose B12GTs when using either ADP-glucose or GDP-glucose as the sugar donor.

[0014] FIG. 3 shows the measured ability of native sucrose synthases to convert ADP to ADP-glucose (top), GDP to GDP-glucose (middle), and UDP to UDP-glucose (bottom).

[0015] FIG. 4 (top) shows the measured conversion of Reb A to Reb D to Reb M2 in a one-pot reaction of the B12GT pA10143 and one of seven native sucrose synthases. FIG. 4 (bottom) shows the measured conversion of Reb A to Reb D in a one-pot reaction of the B12GT pA12549 and one of seven native sucrose synthases.

[0016] FIG. 5 shows the top designs of pA10143 from an active-site site saturation mutagenesis library. The parent enzyme, pA10143, is shown in gray.

[0017] FIG. 6 shows the measured Reb A to Reb D conversion for all enzymes from the pA10143 active-site SSM library by mutated residue.

[0018] FIG. 7 shows the LCMS chromatogram of the reaction product produced from a scaled-up one-pot reaction of pA21841 and pA29798.

[0019] FIG. 8 shows the LCMS chromatogram of the reaction product produced from a scaled-up one-pot reaction of pA21841 and pA29646.

[0020] FIG. 9 shows an SDS-PAGE gel of designed B12GTs purified from Pichia pastoris expression.

[0021] FIG. 10A shows an SDS-PAGE gel of two designed B12GTs purified from a 1 L Pichia pastoris fermentation (order from left to right: pA29798 (B12GT-1), ladder, pA32946 (B12GT-2)). FIG. 10B shows SDS-PAGE gels of two designed SuSys purified from a 1 L Pichia pastoris fermentation (order from left to right: ladder, pA34103 (SuSy-1), ladder, pA32691 (SuSy-2)).

### DETAILED DESCRIPTION

[0022] The present disclosure provides enzymes and biocatalytic processes for preparing a composition comprising a target steviol glycoside by contacting a starting composition comprising a substrate steviol glycoside, sucrose, and NDP with an NDP-glucosyltransferase polypeptide and a sucrose synthase, thereby producing a composition comprising a target steviol glycoside comprising one or more additional glucose units than the substrate steviol glycoside.

[0023] As used herein, “biocatalysis” or “biocatalytic” refers to the use of natural catalysts, such as protein enzymes, to perform chemical transformations on organic compounds. Biocatalysis is alternatively known as biotransformation or biosynthesis. Both isolated and whole cell biocatalysis methods are known in the art. Biocatalyst protein enzymes can be naturally occurring or recombinant proteins.

[0024] As used herein, the term “steviol glycoside(s)” refers to a glycoside of steviol, including, but not limited to, naturally occurring steviol glycosides, e.g. steviol-13-O-glucoside, steviol-19-O-glucoside, rubusoside, steviol-1,2-bioside, steviol-1,3-bioside, rubusoside, dulcoside B, dulcoside A, rebaudioside B, rebaudioside G, stevioside, rebaudioside C, rebaudioside F, rebaudioside A, rebaudioside I, rebaudioside E, rebaudioside H, rebaudioside L, rebaudioside K, rebaudioside J, rebaudioside M, rebaudioside D, rebaudioside N, rebaudioside O, rebaudioside Q, synthetic steviol glycosides, e.g. enzymatically glucosylated steviol glycosides and combinations thereof.

[0025] As used herein, “starting composition” refers to any composition (generally an aqueous solution) containing one or more steviol glycosides, where the one or more steviol glycosides serve as the substrate for the biotransformation.

[0026] As used herein, the terms “polynucleotide” or “nucleic acid” are used interchangeably, unless indicated by context, and is used to refer to a polymeric form of nucleotides of any length, either ribonucleotides or deoxyribonucleotides, typically DNA.

[0027] As used herein, “expression” refers to either or both steps, depending on context, of the two-step process by which polynucleotides are transcribed into mRNA and the transcribed mRNA is subsequently translated into polypeptides.

[0028] “Under transcriptional control” means that transcription of a polynucleotide, usually a DNA sequence, depends on its being operatively linked to an element that promotes transcription.

[0029] “Operatively linked” means that the polynucleotide elements are arranged in a manner that allows them to function in a cell; typically to produce polypeptides in the cell; for example, the disclosure provides promoters operatively linked to the downstream sequences encoding polypeptides.

[0030] The term “encode” refers to the ability of a polynucleotide to produce an mRNA or a polypeptide if it can be transcribed to produce the mRNA and then translated to produce the polypeptide or a fragment thereof. In each case, the polynucleotide is referred to as encoding the mRNA and encoding the polypeptide. The antisense strand is the complement of such a nucleic acid, and the encoding sequence can be deduced therefrom. Similarly, a “coding sequence” refers to a region of a nucleic acid that encodes an mRNA or a polypeptide.

[0031] The term “promoter” as used herein refers to a control sequence that is a portion of a polynucleotide sequence that controls the initiation and rate of transcription of a coding sequence. An “enhancer” is a regulatory element that increases the expression of a target sequence. A “promoter/enhancer” is a polynucleotide with sequences that provide both promoter and enhancer functions.

[0032] The regulatory elements, e.g. enhancers and promoters, may be “homologous” or “heterologous.” A “homologous” regulatory element is one which is naturally linked with a given polynucleotide in the genome; for example, it may be the promoter found natively in the organism upstream of the encoded polypeptide. A “heterologous” regulatory element is one which is placed in juxtaposition to a polynucleotide by means of recombinant molecular biological techniques but is not a combination found in nature. Often, promoters, enhancers and other regulatory elements are heterologous so as to facilitate expression of a polypeptide in a host cell other than one in which a polypeptide naturally occurs. Thus, “heterologous expression”, as used herein, refers to producing an mRNA and/or a polypeptide in a host cell, such as a microorganism, where the polynucleotide is not found naturally or one or more regulatory elements are not naturally found operably linked to the polynucleotide in the host cell.

[0033] The term “polypeptide” is used here to refer to a molecule of two or more subunits of amino acids linked by peptide bonds. Typically, though not always, the polypeptides contain several hundred amino acids; for example, about 400 to about 800 amino acids.

[0034] A “plasmid” is a DNA molecule that is typically separate from and capable of replicating independently of the chromosomal DNA. In many cases, it is circular and double-stranded. It is known in the art that while plasmid vectors often exist as extrachromosomal circular DNA molecules, plasmid vectors may also be designed to be stably integrated into a host chromosome either randomly or in a targeted manner. Many plasmids are commercially available for varied uses. The gene to be replicated is inserted into copies of a plasmid containing genes that make cells resistant to particular antibiotics, and a multiple cloning site (MCS, or polylinker), which is a short region containing several commonly used restriction sites allowing the easy insertion of DNA fragments at this location. Typically, the polypeptides disclosed herein are expressed from plasmids.

[0035] The term “about” or “approximately” when immediately preceding a numerical value means a range (e.g., plus or minus 10% of that value). For example, “about 50” can mean 45 to 55, “about 25,000” can mean 22,500 to 27,500, etc., unless the context of the disclosure indicates otherwise, or is inconsistent with such an interpretation. For example, in a list of numerical values such as “about 49, about 50, about 55, . . . ”, “about 50” means a range extending to less than half the interval(s) between the preceding and subsequent values, e.g., more than 49.5 to less than 52.5. Furthermore, the phrases “less than about” a value or “greater than about” a value should be understood in view of the definition of the term “about” provided herein. Similarly, the term “about” when preceding a series of numerical values or a range of values (e.g., “about 10, 20, 30” or “about 10-30”) refers, respectively to all values in the series, or the endpoints of the range.

[0036] As used herein the terms “microorganism” or “microbe” should be taken broadly. These terms are used interchangeably and include, but are not limited to, the two prokaryotic domains, Bacteria and Archaea, as well as certain eukaryotic fungi and protists. In some embodiments, the disclosure refers to the “microorganisms” or “microbes” of lists and figures present in the disclosure. This characterization can refer to not only the identified taxonomic genera but also the identified taxonomic species, as well as the various novel and newly identified or designed strains of any organism in said tables or figures. The same characterization holds true for the recitation of these terms in other parts of the Specification, such as in the Examples.

[0037] When referring to a nucleic acid sequence or protein sequence, the term “identity” is used to denote similarity between two sequences. Sequence similarity or identity may be determined using standard techniques known in the art, including, but not limited to, the local sequence identity algorithm of Smith & Waterman, Adv. Appl. Math. 2, 482 (1981), by the sequence identity alignment algorithm of Needleman & Wunsch, J Mol. Biol. 48,443 (1970), by the search for similarity method of Pearson & Lipman, Proc. Natl. Acad. Sci. USA 85, 2444 (1988), by computerized implementations of these algorithms (GAP, BESTFIT, FASTA, and TFASTA in the Wisconsin Genetics Software Package, Genetics Computer Group, 575 Science Drive, Madison, WI), the Best Fit sequence program described by Devereux et al., Nucl.

[0038] Acid Res. 12, 387-395 (1984), or by inspection. Another suitable algorithm is the BLAST algorithm, described in Altschul et al., J Mol. Biol. 215, 403-410, (1990) and Karlin et al., Proc. Natl. Acad. Sci. USA 90, 5873-5787 (1993). An exemplary BLAST program is the WU-BLAST-2 program which was obtained from Altschul et al., Methods in Enzymology, 266, 460-480 (1996); blast.wustl/edu/blast/README.html. WU-BLAST-2 uses several search parameters, which are optionally set to the default values. The parameters are dynamic values and are established by the program itself depending upon the composition of the sequence and composition of the particular database against which the sequence of interest is being searched; however, the values may be adjusted to increase sensitivity. Another algorithm is gapped BLAST as reported by Altschul et al, (1997) Nucleic Acids Res. 25, 3389-3402. Other algorithms may be described herein.

[0039] The present disclosure provides non-natural, engineered B-1,2-ADP glycosyltransferases (B12GTs) that can use an ADP-glucose sugar donor to convert stevioside to Reb E and Reb A to Reb D. In a particular embodiment, the glucosyltransferase polypeptide is one of SEQ ID NOs: 6-882 and 1333-1466. In another embodiment, the glucosyltransferase polypeptide is a polypeptide sequence that is at least 60%, 65%, 70%, 75%, 80%, 85%, 86%, 87%, 88%, 89%, 90%, 91%, 92%, 93%, 94%, 95%, 96%, 97%, 98%, 99%, or 100% identical to one of SEQ ID NOs: 6-882 and 1333-1466.

[0040] In bioinformatics, several methods have been developed to find and determine related polypeptide sequences. For example, percent sequence identity, position-specific scoring matrices (PSSMs) and hidden Markov models (HMMs) are all commonly employed to find sequences that are similar to a given query sequence. Percent sequence identity calculates the number of amino acids that are shared between two sequences. Percent sequence identity is calculated in the context of a given alignment between two sequences. Percentage identity may be calculated using the alignment program Clustal Omega (available at /www.ebi.ac.uk/Tools/msa/clustalo/) with default settings. The default transition matrix is Gonnet, gap opening penalty is 6 bits, and gap extension is 1 bit. Clustal Omega uses the HHalign algorithm and its default settings as its core alignment engine. The algorithm is described in Söding, J. (2005) ‘Protein homology detection by HMM-HMM comparison’. Bioinformatics 21, 951-960.

[0041] Position-specific scoring matrices (PSSMs) are a concise way to represent many related sequences. PSSMs are often generated using multiple sequence alignments. The sequence search tool PSI-BLAST generates PSSMs and uses them to search for related polypeptide sequences. A PSSM used to score polypeptide sequences is a matrix (i.e. table) composed of 21 columns by N rows, where N is the length of the related sequences. Each row corresponds to a position within the polypeptide sequence and each column represents a different amino acid (or gap) that the residue position can take on. Each entry in the PSSM represents a score for the specific amino acid at the specific position within the polypeptide sequence. A sequence can be scored with a PSSM by first aligning the sequence to a reference sequence, and then calculating the following sum: S_{PSSM}=Σᵢ₌₁^{N} PSSM (i, aaᵢ), where i is the sequence position and aaᵢ is the amino acid at position i. Related polypeptide sequences will all have high PSSM scores, while unrelated sequences will yield low scores.

[0042] The present disclosure also provides non-natural, engineered sucrose synthases (SuSys) that can use a sucrose sugar donor to convert ADP to ADP-glucose. In a particular embodiment, the SuSy polypeptide is one of SEQ ID NOs: 890-1227 and 1231-1332. In another embodiment, the SuSy polypeptide is a polypeptide sequence that is at least 60%, 65%, 70%, 75%, 80%, 85%, 86%, 87%, 88%, 89%, 90%, 91%, 92%, 93%, 94%, 95%, 96%, 97%, 98%, 99%, or 100% identical to one of SEQ ID NOs: 890-1227 and 1231-1332.

[0043] In some embodiments, the glucosyltransferase and/or sucrose synthase polypeptides are prepared by expression in a host microorganism. Suitable host microorganisms include, but are not limited to, E. coli, Saccharomyces sp., Aspergillus sp., Pichia sp., Bacillus sp. In a particular embodiment, the glucosyltransferase and sucrose synthase are expressed in E. coli. In a particular embodiment, the glucosyltransferase and sucrose synthase are expressed in Pichia pastoris.

[0044] The B12GT and/or SuSy polypeptide can be provided in any suitable form, including free, immobilized, or as a whole cell system. The degree of purity of the glucosyltransferase polypeptide may vary, e.g., it may be provided as a crude, semi-purified, or purified enzyme preparation(s). In one embodiment, the glycosyltransferase polypeptide is free. In another embodiment, the glycosyltransferase polypeptide is immobilized to a solid support, for example on an inorganic or organic support. In some embodiments, the solid support is derivatized cellulose, glass, ceramic, methacrylate, styrene, acrylic, a metal oxide, or a membrane. In some embodiments, the glucosyltransferase polypeptide is immobilized to the solid support by covalent attachment, adsorption, cross-linking, entrapment, or encapsulation.

[0045] In yet another embodiment, the B12GT and/or SuSy polypeptide is provided in the form of a whole cell system, for example as a living fermentative microbial cell, or as dead and stabilized microbial cell, or in the form of a cell lysate.

[0046] The present disclosure provides a biocatalytic process for the preparation of a composition comprising a target steviol glycoside from a starting composition comprising a substrate steviol glycoside, wherein the target steviol glycoside comprises one or more additional glucose units than the substrate steviol glycoside. The biocatalytic process comprises contacting a B12GT and a SuSy with a starting composition comprising one or more steviol glycosides, a non-UDP nucleotide diphosphate, and sucrose. In another embodiment, the biocatalytic process comprises contacting an engineered B12GT and a SuSy with a starting composition comprising one or more steviol glycosides, a non-UDP nucleotide diphosphate, and sucrose. In another embodiment, the biocatalytic process comprises contacting an engineered B12GT and an engineered SuSy with a starting composition comprising one or more steviol glycosides, a non-UDP nucleotide diphosphate, and sucrose. In some embodiments, the method comprises contacting RA50, ADP, and sucrose with an engineered B1,2 glycosyltransferase and a sucrose synthase to make Reb D and Reb E.

[0047] In one embodiment, the B12GT polypeptide is one of SEQ ID NOs: 1-882 and 1333-1466. In another embodiment, the glucosyltransferase polypeptide is a polypeptide sequence that is at least 60%, 65%, 70%, 75%, 80%, 85%, 86%, 87%, 88%, 89%, 90%, 91%, 92%, 93%, 94%, 95%, 96%, 97%, 98%, 99%, or 100% identical to one of SEQ ID NOs: 1-882. In another embodiment, the glucosyltransferase polypeptide is a polypeptide sequence that is at least 60%, 65%, 70%, 75%, 80%, 85%, 86%, 87%, 88%, 89%, 90%, 91%, 92%, 93%, 94%, 95%, 96%, 97%, 98%, 99%, or 100% identical to one of SEQ ID NOs: 6-882 and 1333-1466. Preferably, the catalytic domain in the B12GT polypeptide contains residues corresponding to H at position 15, D at position 114, D at position 357, and Q at position 358, numbered according to SEQ ID NO: 5.

[0048] In one embodiment, the sucrose synthase is any polypeptide with sucrose synthase activity. In another embodiment, the sucrose synthase is derived from an organism from the Bacteria domain. In another embodiment, the sucrose synthase is derived from an organism from the Plantae kingdom. In another embodiment, the sucrose synthase is derived from an organism from the Plantae kingdom. In another embodiment, the sucrose synthase is derived from an organism from the proteobacteria, deferribacteres, or cyanobacteria phylum. In another embodiment, the sucrose synthase is derived from the species Acidithiobacillus caldus, Nitrosomonas europaea, Denitrovibrio acetiphilus, Thermosynechococcus elongatus, Oryza sativa, Arabidopsis thaliana, or Coffea arabica. In one embodiment, the sucrose synthase is one of SEQ ID NOs: 883-1227 and 1231-1332. In another embodiment, the sucrose synthase is an engineered sucrose synthase with a polypeptide sequence that is at least 60%, 65%, 70%, 75%, 80%, 85%, 86%, 87%, 88%, 89%, 90%, 91%, 92%, 93%, 94%, 95%, 96%, 97%, 98%, 99%, or more sequence identity to one of SEQ ID NOs: 883-1227. In another embodiment, the sucrose synthase is an engineered sucrose synthase with a polypeptide sequence that is at least 60%, 65%, 70%, 75%, 80%, 85%, 86%, 87%, 88%, 89%, 90%, 91%, 92%, 93%, 94%, 95%, 96%, 97%, 98%, 99%, or more sequence identity to one of SEQ ID NOs: 890-1227 and 1231-1332. Preferably, the catalytic domain in the SuSy polypeptide contains residues corresponding to H at position 425, R at position 567, K at position 572, and E at position 663, numbered according to SEQ ID NO: 885 or residues corresponding to H at position 436, R at position 578, K at position 583, and E at position 674, numbered according to SEQ ID NO: 888.

[0049] In some embodiments, the glucosyltransferase and/or sucrose synthase polypeptides are prepared by expression in a host microorganism. Suitable host microorganisms include, but are not limited to, E. coli, Saccharomyces sp., Aspergillus sp., Pichia sp., Bacillus sp. In a particular embodiment, the glucosyltransferase and sucrose synthase are expressed in E. coli. In another embodiment, the glucosyltransferase and sucrose synthase are expressed in Pichia pastoris. In another embodiment, the glucosyltransferase and/or sucrose synthase polypeptides are prepared by cell-free expression.

[0050] The B12GT and sucrose synthase polypeptides can be provided in any suitable form, including free, immobilized, or as a whole cell system. The degree of purity of the polypeptides may vary, e.g., they may be provided as a crude, semi-purified, or purified enzyme preparation(s). In one embodiment, the B12GT and/or SuSy polypeptide is free. In another embodiment, the B12GT and/or SuSy polypeptide is immobilized to a solid support, for example on an inorganic or organic support. In some embodiments, the solid support is derivatized cellulose, glass, ceramic, methacrylate, styrene, acrylic, a metal oxide, or a membrane. In some embodiments, the B12GT and/or SuSy polypeptide is immobilized to the solid support by covalent attachment, adsorption, cross-linking, entrapment, or encapsulation.

[0051] In yet another embodiment, the B12GT and/or SuSy polypeptide is provided in the form of a whole cell system, for example as a living fermentative microbial cell, or as dead and stabilized microbial cell, or in the form of a cell lysate.

[0052] The steviol glycoside component(s) of the starting composition serves as a substrate(s) for the production of the target steviol glycoside(s), as described herein. The target steviol glycoside target(s) differs chemically from its corresponding substrate steviol glycoside(s) by the addition of one or more glucose units.

[0053] The starting steviol glycoside composition can contain at least one substrate steviol glycoside. In an embodiment, the substrate steviol glycoside is selected from the group consisting of steviol, steviol-13-O-glucoside, steviol-19-O-glucoside, rubusoside, steviol-1,2-bioside, steviol-1,3-bioside, rubusoside, dulcoside B, dulcoside A, rebaudioside B, rebaudioside G, stevioside, rebaudioside C, rebaudioside F, rebaudioside A, rebaudioside I, rebaudioside E, rebaudioside H, rebaudioside L, rebaudioside K, rebaudioside J, rebaudioside M, rebaudioside D, rebaudioside N, rebaudioside O, rebaudioside Q, an isomer thereof, a synthetic steviol glycoside or combinations thereof. In another embodiment, the starting steviol glycoside composition is composed of stevioside and Reb A. In another embodiment, the starting steviol glycoside composition is composed of stevioside. In yet another embodiment, the starting steviol glycoside composition is composed of Reb A.

[0054] The starting steviol glycoside composition may be synthetic or purified (partially or entirely), commercially available or prepared. One example of a starting composition useful in the method of the present disclosure is an extract obtained from purification of Stevia rebaudiana plant material (e.g. leaves). Another example of a starting composition is a commercially available stevia extract brought into solution with a solvent. Yet another example of a starting composition is a commercially available mixture of steviol glycosides brought into solution with a solvent. Other suitable starting compositions include by-products of processes to isolate and purify steviol glycosides.

[0055] In one embodiment, the starting composition comprises a purified substrate steviol glycoside. For example, the starting composition may comprise greater than about 50%, greater than about 60%, greater than about 70%, greater than about 80%, greater than about 85%, greater than about 90%, greater than about 91%, greater than about 92%, greater than about 93%, greater than about 94%, greater than about 95%, greater than about 96%, greater than about 97%, greater than about 98%, greater than about 99%, or greater than about 99.6% of one or more substrate steviol glycosides by weight on an anhydrous basis.

[0056] In another embodiment, the starting composition comprises a partially purified substrate steviol glycoside composition. For example, the starting composition contains greater than about 0.5%, greater than about 1%, greater than about 2%, greater than about 3%, greater than about 4%, greater than about 5%, greater than about 10%, greater than about 20%, greater than about 30%, greater than about 40%, or greater than about 50%, of one or more substrate steviol glycosides by weight on an anhydrous basis.

[0057] In another embodiment, the substrate steviol glycoside is purified rebaudioside A, or isomers thereof. In a particular embodiment, the substrate steviol glycoside contains greater than 99% rebaudioside A, or isomers thereof, by weight on an anhydrous basis. In another embodiment, the substrate steviol glycoside comprises partially purified rebaudioside A. In a particular embodiment, the substrate steviol glycoside contains greater than about 1%, 5%, 10%, 20%, 30%, 40%, 50%, 60%, 70%, 80% or 90% rebaudioside A by weight on an anhydrous basis.

[0058] In yet another embodiment, the substrate steviol glycoside comprises purified stevioside, or isomers thereof. In a particular embodiment, the substrate steviol glycoside contains greater than 99% stevioside, or isomers thereof, by weight on an anhydrous basis. In another embodiment, the substrate steviol glycoside comprises partially purified stevioside. In a particular embodiment, the substrate steviol glycoside contains greater than about 10%, 20%, 30%, 40%, 50%, 60%, 70%, 80% or 90% stevioside by weight on an anhydrous basis.

[0059] In yet another embodiment, the substrate steviol glycoside is a combination of stevioside and rebaudioside A. In a particular embodiment, the substrate steviol glycoside contains greater than about 5% stevioside and greater than about 5% Reb A, greater than about 10% stevioside and greater than about 10% Reb A, greater than about 20% stevioside and greater than about 20% Reb A, greater than about 30% stevioside and greater than about 30% Reb A, greater than about 40% stevioside and greater than about 40% Reb A, greater than about 45% stevioside and greater than about 45% Reb A, greater than about 40% stevioside and greater than about 50% Reb A, greater than about 30% stevioside and greater than about 60% Reb A, greater than about 20% stevioside and greater than about 70% Reb A, greater than about 10% stevioside and greater than about 80% Reb A, greater than about 5% stevioside and greater than about 90% Reb A, greater than about 50% stevioside and greater than about 40% Reb A, greater than about 60% stevioside and greater than about 30% Reb A, greater than about 70% stevioside and greater than about 20% Reb A, greater than about 80% stevioside and greater than about 10% Reb A, or greater than about 90% stevioside and greater than about 5% Reb A by weight on an anhydrous basis.

[0060] In still another embodiment, the substrate steviol glycoside is derived from stevia leaf extract. In one embodiment, RA50, stevia leaf extract purified to contain greater than 50% Reb A, is used as the steviol glycoside substrate. In one embodiment, RA50 is used at a concentration between about 1 and 800 mg/mL. In another embodiment, RA50 is used at a concentration of about 100 mg/mL.

[0061] The one pot reaction can be carried out with a nucleotide cofactor that can be converted to an NDP-glucose by sucrose synthase. In some embodiments, the nucleotide can be a non-UDP nucleotide (i.e. ADP-glucose, GDP-glucose, CDP-glucose, or TDP-glucose). In another embodiment, the nucleotide is ADP. In a particular embodiment, the one pot reaction can be carried out with ADP at a concentration between about 0.01 and 10 mM, such as, for example, between 0.01 mM and 0.05 mM, between 0.05 mM and 0.1 mM, between 0.1 mM and 0.5 mM, between 0.5 mM and 1 mM, between 1 mM and 5 mM, or between 5 mM and 10 mM. In a particular embodiment, ADP is used at a concentration of 0.5 mM.

[0062] The one pot reaction can be carried out with a sucrose concentration between about 10 mM and 2M, such as, for example, greater than 10 mM, greater than 50 mM, greater than 100 mM, greater than 250 mM, greater than 500 mM, greater than 1 M, greater than 1.5 M and greater than 2 M. In a particular embodiment, sucrose is used at a concentration of 250 mM.

[0063] In one embodiment, the reaction is run at any temperature. In another embodiment, the one-pot reaction is run at a temperature between about 10° C. and 80° C. Such as, for example, between 10° C. to 20° C., between 20° C. to 30° C., between 30° C. to 40° C., between 40° C. to 50° C., between 50° C. to 60° C., between 60° C. to 70° C., between 70° C. to 80° C. or 80° C. In a particular embodiment, the one-pot reaction is carried out at 60° C.

[0064] The reaction medium for conversion is generally aqueous, e.g., purified water, buffer, or a combination thereof. In a particular embodiment, the reaction medium is a buffer. Suitable buffers include, but are not limited to, acetate buffer, citrate buffer, HEPES, and phosphate buffer. In a particular embodiment, the reaction medium is phosphate buffer. The reaction medium can have a pH between about 4 and 10. In a particular embodiment, the reaction medium has a pH of 6. The reaction medium can also be, alternatively, an organic solvent.

[0065] The step of contacting the starting composition with the glycosyltransferase and sucrose synthase polypeptides can be carried out in a duration of time between about 1 hour and 1 week, such as, for example, between 30 minutes and 1 hours, between 1 hour and 4 hours, between 4 hours and 6 hours, between 6 hours and 12 hours, between 12 hours and 24 hours, between 1 day and 2 days, between 2 days and 3 days, 3 days and 4 days, between 4 days and 5 days, between 6 days and 7 days. In a particular embodiment, the reaction is carried out for 24 hours.

[0066] The reaction can be monitored by suitable method including, but not limited to, HPLC, LCMS, TLC, IR or NMR.

[0067] The target steviol glycoside can be any steviol glycoside. In one embodiment, the target steviol glycoside is steviol-13-O-glucoside, steviol-19-O-glucoside, rubusoside, steviol-1,2-bioside, steviol-1,3-bioside, rubusoside, dulcoside B, dulcoside A, rebaudioside B, rebaudioside G, stevioside, rebaudioside C, rebaudioside F, rebaudioside A, rebaudioside I, rebaudioside E, rebaudioside H, rebaudioside L, rebaudioside K, rebaudioside J, rebaudioside M, rebaudioside D, rebaudioside N, rebaudioside O, rebaudioside Q, a rebaudioside with 7 covalently attached glucose units (e.g. rebaudioside M plus 1 glucose unit), a synthetic steviol glycoside, an isomer thereof, and/or a steviol glycoside composition. In another embodiment, the target steviol glycoside is rebaudioside E, or isomers thereof. In another embodiment, the target steviol glycoside is rebaudioside D, or isomers thereof. In still another embodiment, the target steviol glycosides are Reb D and Reb E.

[0068] In one embodiment, the conversion of Reb A to Reb D and/or Reb D isomer(s) is at least about 2% complete, as determined by any of the methods mentioned above. In a particular embodiment, the conversion of Reb A to Reb D and/or Reb D isomer(s) is at least about 10% complete, at least about 20% complete, at least about 30% complete, at least about 40% complete, at least about 50% complete, at least about 60% complete, at least about 70% complete, at least about 80% complete, or at least about 90% complete. In a particular embodiment, the conversion of reb A to reb D and/or rebD isomer(s) is at least about 95% complete. In some embodiments, at least about 5%, 10%, 20%, 30%, 40%, 50%, 60%, 70%, 80%, or 90% of the Reb A in the starting composition is converted to Reb D and/or Reb D isomer(s).

[0069] In one embodiment, the conversion of stevioside to Reb E and/or Reb E isomer(s) is at least about 2% complete, as determined by any of the methods mentioned above. In a particular embodiment, the conversion of stevioside to Reb E and/or Reb E isomer(s) is at least about 10% complete, at least about 20% complete, at least about 30% complete, at least about 40% complete, at least about 50% complete, at least about 60% complete, at least about 70% complete, at least about 80% complete, or at least about 90% complete. In a particular embodiment, the conversion of stevioside to Reb E and/or Reb E isomer(s) is at least about 95% complete. In some embodiments, at least about 5%, 10%, 20%, 30%, 40%, 50%, 60%, 70%, 80%, or 90% of the stevioside in the starting composition is converted to Reb E and/or Reb E isomer(s).

[0070] The target steviol glycoside(s) can be in any polymorphic or amorphous form, including hydrates, solvates, anhydrous or combinations thereof.

[0071] Optionally, the method of the present disclosure further comprises separating the target steviol glycoside from the target composition. The target steviol glycoside(s) can be separated by any suitable method, such as, for example, crystallization, separation by membranes, centrifugation, extraction, chromatographic separation or a combination of such methods.

[0072] In one embodiment, the separation of target steviol glycosides produces a composition comprising greater than about 80% by weight of the target steviol glycoside(s) on an anhydrous basis, i.e., a highly purified steviol glycoside composition. In another embodiment, separation produces a composition comprising greater than about 0.5%, greater than about 1%, greater than about 2%, greater than about 3%, greater than about 4%, greater than about 5%, greater than about 10%, greater than about 20%, greater than about 30%, greater than about 40%, greater than about 50%, greater than about 60%, greater than about 70%, greater than about 80%, greater than about 85%, greater than about 90%, greater than about 91%, greater than about 92%, greater than about 93%, greater than about 94%, greater than about 95%, greater than about 96%, greater than about 97%, greater than about 98%, greater than about 99%, or greater than about 99.6% by weight of the target steviol glycosides. In particular embodiments, the composition comprises greater than about 95% by weight of the target steviol glycoside(s). Purified target steviol glycosides can be used in consumable products as a sweetener.

[0073] Suitable consumer products include, but are not limited to, food, beverages, pharmaceutical compositions, tobacco products, nutraceutical compositions, oral hygiene compositions, and cosmetic compositions.

[0074] Plasmids containing nucleic acids encoding enzymes having SEQ ID NOS: 1-1227 and 1231-1466 are described in the Table 1 below.

TABLE 1

| SEQ ID | Plasmid |
|---|---|
| NO | ID |
| 1 | pA10132 |
| 2 | pA10143 |
| 3 | pA12549 |
| 4 | pA12550 |
| 5 | pA28422 |
| 6 | pA30328 |
| 7 | pA30329 |
| 8 | pA30331 |
| 9 | pA30332 |
| 10 | pA30333 |
| 11 | pA30334 |
| 12 | pA30335 |
| 13 | pA30337 |
| 14 | pA30338 |
| 15 | pA30339 |
| 16 | pA30340 |
| 17 | pA30341 |
| 18 | pA30342 |
| 19 | pA30343 |
| 20 | pA30345 |
| 21 | pA30347 |
| 22 | pA30348 |
| 23 | pA30350 |
| 24 | pA30351 |
| 25 | pA30352 |
| 26 | pA30354 |
| 27 | pA30358 |
| 28 | pA30362 |
| 29 | pA30463 |
| 30 | pA30468 |
| 31 | pA30471 |
| 32 | pA30472 |
| 33 | pA30473 |
| 34 | pA30557 |
| 35 | pA30565 |
| 36 | pA30568 |
| 37 | pA30569 |
| 38 | pA30570 |
| 39 | pA30571 |
| 40 | pA30785 |
| 41 | pA30787 |
| 42 | pA30790 |
| 43 | pA30791 |
| 44 | pA30793 |
| 45 | pA30796 |
| 46 | pA30797 |
| 47 | pA30798 |
| 48 | pA30799 |
| 49 | pA30802 |
| 50 | pA30803 |
| 51 | pA30805 |
| 52 | pA30806 |
| 53 | pA30808 |
| 54 | pA30811 |
| 55 | pA30812 |
| 56 | pA30814 |
| 57 | pA30817 |
| 58 | pA30820 |
| 59 | pA30879 |
| 60 | pA30880 |
| 61 | pA30882 |
| 62 | pA30883 |
| 63 | pA30884 |
| 64 | pA30885 |
| 65 | pA30886 |
| 66 | pA30887 |
| 67 | pA30888 |
| 68 | pA30892 |
| 69 | pA30894 |
| 70 | pA30895 |
| 71 | pA30935 |
| 72 | pA30936 |
| 73 | pA30937 |
| 74 | pA30938 |
| 75 | pA30939 |
| 76 | pA30940 |
| 77 | pA30941 |
| 78 | pA30942 |
| 79 | pA30943 |
| 80 | pA30944 |
| 81 | pA30945 |
| 82 | pA30946 |
| 83 | pA30947 |
| 84 | pA30948 |
| 85 | pA30949 |
| 86 | pA30951 |
| 87 | pA30952 |
| 88 | pA30953 |
| 89 | pA30997 |
| 90 | pA30998 |
| 91 | pA31001 |
| 92 | pA31003 |
| 93 | pA31004 |
| 94 | pA31005 |
| 95 | pA31006 |
| 96 | pA31009 |
| 97 | pA31011 |
| 98 | pA31012 |
| 99 | pA31014 |
| 100 | pA31016 |
| 101 | pA31017 |
| 102 | pA31018 |
| 103 | pA31020 |
| 104 | pA31022 |
| 105 | pA31024 |
| 106 | pA31026 |
| 107 | pA31029 |
| 108 | pA31068 |
| 109 | pA31069 |
| 110 | pA31070 |
| 111 | pA31071 |
| 112 | pA31073 |
| 113 | pA31074 |
| 114 | pA31075 |
| 115 | pA31076 |
| 116 | pA31078 |
| 117 | pA31080 |
| 118 | pA31081 |
| 119 | pA31086 |
| 120 | pA31125 |
| 121 | pA31126 |
| 122 | pA31127 |
| 123 | pA31128 |
| 124 | pA31129 |
| 125 | pA31130 |
| 126 | pA31134 |
| 127 | pA31135 |
| 128 | pA31136 |
| 129 | pA31138 |
| 130 | pA31142 |
| 131 | pA31163 |
| 132 | pA31167 |
| 133 | pA31169 |
| 134 | pA31172 |
| 135 | pA31173 |
| 136 | pA31174 |
| 137 | pA31175 |
| 138 | pA31177 |
| 139 | pA31178 |
| 140 | pA31179 |
| 141 | pA31181 |
| 142 | pA31258 |
| 143 | pA31259 |
| 144 | pA31261 |
| 145 | pA31262 |
| 146 | pA31263 |
| 147 | pA31264 |
| 148 | pA31265 |
| 149 | pA31267 |
| 150 | pA31268 |
| 151 | pA31273 |
| 152 | pA31274 |
| 153 | pA31276 |
| 154 | pA31278 |
| 155 | pA31279 |
| 156 | pA31280 |
| 157 | pA31282 |
| 158 | pA31285 |
| 159 | pA31286 |
| 160 | pA31287 |
| 161 | pA31288 |
| 162 | pA31289 |
| 163 | pA31290 |
| 164 | pA31291 |
| 165 | pA31294 |
| 166 | pA31297 |
| 167 | pA31298 |
| 168 | pA31300 |
| 169 | pA31302 |
| 170 | pA31303 |
| 171 | pA31304 |
| 172 | pA31305 |
| 173 | pA31306 |
| 174 | pA31307 |
| 175 | pA31308 |
| 176 | pA31309 |
| 177 | pA31310 |
| 178 | pA31311 |
| 179 | pA31313 |
| 180 | pA31336 |
| 181 | pA31345 |
| 182 | pA31346 |
| 183 | pA31347 |
| 184 | pA31350 |
| 185 | pA31352 |
| 186 | pA31353 |
| 187 | pA31354 |
| 188 | pA31355 |
| 189 | pA31356 |
| 190 | pA31358 |
| 191 | pA31360 |
| 192 | pA31362 |
| 193 | pA31364 |
| 194 | pA31366 |
| 195 | pA31367 |
| 196 | pA31368 |
| 197 | pA31369 |
| 198 | pA31505 |
| 199 | pA31506 |
| 200 | pA31507 |
| 201 | pA31508 |
| 202 | pA31509 |
| 203 | pA31510 |
| 204 | pA31511 |
| 205 | pA31512 |
| 206 | pA31513 |
| 207 | pA31515 |
| 208 | pA31516 |
| 209 | pA31517 |
| 210 | pA31518 |
| 211 | pA31519 |
| 212 | pA31520 |
| 213 | pA31521 |
| 214 | pA31522 |
| 215 | pA31523 |
| 216 | pA31545 |
| 217 | pA31548 |
| 218 | pA31549 |
| 219 | pA31558 |
| 220 | pA31559 |
| 221 | pA31560 |
| 222 | pA31561 |
| 223 | pA29916 |
| 224 | pA29917 |
| 225 | pA29918 |
| 226 | pA29919 |
| 227 | pA29920 |
| 228 | pA29921 |
| 229 | pA29922 |
| 230 | pA29923 |
| 231 | pA29924 |
| 232 | pA29925 |
| 233 | pA29926 |
| 234 | pA29927 |
| 235 | pA29928 |
| 236 | pA29929 |
| 237 | pA29930 |
| 238 | pA29931 |
| 239 | pA29932 |
| 240 | pA29933 |
| 241 | pA29934 |
| 242 | pA29935 |
| 243 | pA29937 |
| 244 | pA29938 |
| 245 | pA29939 |
| 246 | pA29941 |
| 247 | pA29942 |
| 248 | pA29943 |
| 249 | pA29944 |
| 250 | pA29945 |
| 251 | pA29946 |
| 252 | pA29947 |
| 253 | pA29948 |
| 254 | pA29949 |
| 255 | pA29950 |
| 256 | pA29951 |
| 257 | pA29952 |
| 258 | pA29953 |
| 259 | pA29954 |
| 260 | pA29955 |
| 261 | pA29956 |
| 262 | pA29957 |
| 263 | pA29958 |
| 264 | pA29959 |
| 265 | pA29960 |
| 266 | pA29961 |
| 267 | pA29962 |
| 268 | pA29963 |
| 269 | pA29964 |
| 270 | pA29965 |
| 271 | pA29966 |
| 272 | pA29967 |
| 273 | pA29968 |
| 274 | pA29969 |
| 275 | pA29970 |
| 276 | pA29971 |
| 277 | pA29972 |
| 278 | pA29973 |
| 279 | pA29976 |
| 280 | pA29977 |
| 281 | pA29978 |
| 282 | pA29979 |
| 283 | pA29980 |
| 284 | pA29981 |
| 285 | pA29982 |
| 286 | pA29983 |
| 287 | pA29984 |
| 288 | pA29985 |
| 289 | pA29986 |
| 290 | pA29987 |
| 291 | pA29989 |
| 292 | pA29990 |
| 293 | pA29991 |
| 294 | pA29992 |
| 295 | pA29993 |
| 296 | pA29994 |
| 297 | pA29995 |
| 298 | pA29996 |
| 299 | pA29997 |
| 300 | pA29998 |
| 301 | pA30000 |
| 302 | pA30001 |
| 303 | pA30002 |
| 304 | pA30003 |
| 305 | pA30004 |
| 306 | pA30005 |
| 307 | pA30006 |
| 308 | pA30007 |
| 309 | pA30008 |
| 310 | pA30009 |
| 311 | pA30010 |
| 312 | pA30011 |
| 313 | pA30012 |
| 314 | pA30013 |
| 315 | pA30014 |
| 316 | pA29705 |
| 317 | pA29706 |
| 318 | pA29707 |
| 319 | pA29708 |
| 320 | pA29709 |
| 321 | pA29710 |
| 322 | pA29711 |
| 323 | pA29712 |
| 324 | pA29713 |
| 325 | pA29714 |
| 326 | pA29715 |
| 327 | pA29716 |
| 328 | pA29717 |
| 329 | pA29718 |
| 330 | pA29719 |
| 331 | pA29720 |
| 332 | pA29721 |
| 333 | pA29722 |
| 334 | pA29723 |
| 335 | pA29724 |
| 336 | pA29725 |
| 337 | pA29726 |
| 338 | pA29727 |
| 339 | pA29728 |
| 340 | pA29729 |
| 341 | pA29730 |
| 342 | pA29731 |
| 343 | pA29732 |
| 344 | pA29733 |
| 345 | pA29734 |
| 346 | pA29735 |
| 347 | pA29736 |
| 348 | pA29737 |
| 349 | pA29738 |
| 350 | pA29740 |
| 351 | pA29741 |
| 352 | pA29742 |
| 353 | pA29743 |
| 354 | pA29744 |
| 355 | pA29745 |
| 356 | pA29746 |
| 357 | pA29747 |
| 358 | pA29748 |
| 359 | pA29749 |
| 360 | pA29750 |
| 361 | pA29751 |
| 362 | pA29752 |
| 363 | pA29753 |
| 364 | pA29754 |
| 365 | pA29755 |
| 366 | pA29756 |
| 367 | pA29757 |
| 368 | pA29758 |
| 369 | pA29759 |
| 370 | pA29760 |
| 371 | pA29761 |
| 372 | pA29762 |
| 373 | pA29763 |
| 374 | pA29764 |
| 375 | pA29765 |
| 376 | pA32567 |
| 377 | pA32568 |
| 378 | pA32569 |
| 379 | pA32570 |
| 380 | pA32571 |
| 381 | pA32572 |
| 382 | pA32573 |
| 383 | pA32574 |
| 384 | pA32576 |
| 385 | pA33083 |
| 386 | pA33084 |
| 387 | pA33085 |
| 388 | pA33086 |
| 389 | pA33087 |
| 390 | pA33088 |
| 391 | pA33089 |
| 392 | pA33090 |
| 393 | pA33091 |
| 394 | pA33092 |
| 395 | pA33094 |
| 396 | pA33095 |
| 397 | pA33096 |
| 398 | pA33097 |
| 399 | pA33098 |
| 400 | pA33099 |
| 401 | pA33100 |
| 402 | pA33101 |
| 403 | pA33102 |
| 404 | pA33103 |
| 405 | pA33104 |
| 406 | pA33105 |
| 407 | pA33106 |
| 408 | pA33107 |
| 409 | pA33108 |
| 410 | pA33109 |
| 411 | pA33110 |
| 412 | pA33111 |
| 413 | pA33112 |
| 414 | pA33114 |
| 415 | pA33115 |
| 416 | pA33116 |
| 417 | pA33117 |
| 418 | pA33118 |
| 419 | pA33119 |
| 420 | pA33120 |
| 421 | pA33122 |
| 422 | pA33123 |
| 423 | pA33124 |
| 424 | pA33125 |
| 425 | pA33129 |
| 426 | pA33130 |
| 427 | pA33131 |
| 428 | pA33132 |
| 429 | pA33133 |
| 430 | pA33134 |
| 431 | pA33135 |
| 432 | pA33136 |
| 433 | pA33137 |
| 434 | pA33138 |
| 435 | pA33139 |
| 436 | pA33140 |
| 437 | pA33141 |
| 438 | pA33142 |
| 439 | pA33143 |
| 440 | pA33144 |
| 441 | pA33145 |
| 442 | pA33146 |
| 443 | pA33147 |
| 444 | pA33148 |
| 445 | pA33149 |
| 446 | pA33150 |
| 447 | pA33151 |
| 448 | pA33152 |
| 449 | pA33153 |
| 450 | pA33154 |
| 451 | pA33159 |
| 452 | pA33160 |
| 453 | pA33162 |
| 454 | pA33163 |
| 455 | pA33164 |
| 456 | pA33165 |
| 457 | pA33166 |
| 458 | pA33167 |
| 459 | pA33168 |
| 460 | pA32557 |
| 461 | pA32558 |
| 462 | pA32559 |
| 463 | pA32560 |
| 464 | pA32562 |
| 465 | pA32563 |
| 466 | pA32565 |
| 467 | pA32566 |
| 468 | pA33169 |
| 469 | pA33171 |
| 470 | pA33172 |
| 471 | pA33173 |
| 472 | pA33174 |
| 473 | pA33175 |
| 474 | pA33176 |
| 475 | pA33177 |
| 476 | pA33178 |
| 477 | pA33179 |
| 478 | pA33180 |
| 479 | pA33181 |
| 480 | pA33182 |
| 481 | pA33184 |
| 482 | pA33185 |
| 483 | pA33186 |
| 484 | pA33188 |
| 485 | pA33189 |
| 486 | pA33190 |
| 487 | pA33191 |
| 488 | pA33192 |
| 489 | pA33193 |
| 490 | pA33194 |
| 491 | pA33195 |
| 492 | pA33196 |
| 493 | pA33197 |
| 494 | pA33198 |
| 495 | pA33199 |
| 496 | pA33200 |
| 497 | pA33201 |
| 498 | pA33202 |
| 499 | pA33203 |
| 500 | pA33204 |
| 501 | pA33205 |
| 502 | pA33206 |
| 503 | pA33207 |
| 504 | pA33208 |
| 505 | pA33209 |
| 506 | pA33210 |
| 507 | pA33211 |
| 508 | pA33212 |
| 509 | pA33213 |
| 510 | pA33214 |
| 511 | pA33215 |
| 512 | pA33216 |
| 513 | pA33217 |
| 514 | pA33218 |
| 515 | pA33219 |
| 516 | pA33220 |
| 517 | pA33221 |
| 518 | pA33222 |
| 519 | pA33223 |
| 520 | pA33224 |
| 521 | pA33225 |
| 522 | pA33226 |
| 523 | pA33227 |
| 524 | pA33228 |
| 525 | pA33229 |
| 526 | pA33230 |
| 527 | pA33231 |
| 528 | pA33232 |
| 529 | pA33233 |
| 530 | pA33234 |
| 531 | pA33235 |
| 532 | pA33236 |
| 533 | pA33237 |
| 534 | pA33238 |
| 535 | pA29767 |
| 536 | pA29768 |
| 537 | pA29769 |
| 538 | pA29770 |
| 539 | pA29771 |
| 540 | pA29772 |
| 541 | pA29773 |
| 542 | pA29774 |
| 543 | pA29775 |
| 544 | pA29776 |
| 545 | pA29777 |
| 546 | pA29778 |
| 547 | pA29779 |
| 548 | pA29780 |
| 549 | pA29781 |
| 550 | pA29782 |
| 551 | pA29783 |
| 552 | pA29784 |
| 553 | pA29785 |
| 554 | pA29786 |
| 555 | pA29787 |
| 556 | pA29788 |
| 557 | pA29789 |
| 558 | pA29790 |
| 559 | pA29791 |
| 560 | pA29792 |
| 561 | pA29793 |
| 562 | pA29794 |
| 563 | pA29795 |
| 564 | pA29796 |
| 565 | pA29797 |
| 566 | pA29798 |
| 567 | pA29799 |
| 568 | pA29800 |
| 569 | pA29801 |
| 570 | pA29802 |
| 571 | pA29803 |
| 572 | pA29804 |
| 573 | pA29805 |
| 574 | pA29806 |
| 575 | pA29807 |
| 576 | pA29808 |
| 577 | pA29809 |
| 578 | pA29810 |
| 579 | pA29811 |
| 580 | pA29812 |
| 581 | pA29813 |
| 582 | pA29814 |
| 583 | pA29815 |
| 584 | pA29816 |
| 585 | pA29817 |
| 586 | pA29818 |
| 587 | pA29615 |
| 588 | pA29616 |
| 589 | pA29617 |
| 590 | pA29618 |
| 591 | pA29619 |
| 592 | pA29620 |
| 593 | pA29621 |
| 594 | pA29622 |
| 595 | pA29623 |
| 596 | pA29624 |
| 597 | pA29625 |
| 598 | pA29626 |
| 599 | pA29627 |
| 600 | pA29628 |
| 601 | pA29629 |
| 602 | pA29630 |
| 603 | pA29631 |
| 604 | pA29632 |
| 605 | pA29633 |
| 606 | pA29634 |
| 607 | pA29635 |
| 608 | pA29636 |
| 609 | pA29637 |
| 610 | pA29638 |
| 611 | pA29639 |
| 612 | pA29640 |
| 613 | pA29641 |
| 614 | pA29642 |
| 615 | pA29643 |
| 616 | pA29645 |
| 617 | pA29646 |
| 618 | pA29647 |
| 619 | pA29648 |
| 620 | pA29649 |
| 621 | pA29650 |
| 622 | pA29651 |
| 623 | pA29652 |
| 624 | pA29653 |
| 625 | pA29654 |
| 626 | pA29655 |
| 627 | pA29656 |
| 628 | pA29657 |
| 629 | pA29658 |
| 630 | pA29659 |
| 631 | pA29660 |
| 632 | pA29661 |
| 633 | pA29662 |
| 634 | pA29664 |
| 635 | pA29665 |
| 636 | pA29666 |
| 637 | pA29667 |
| 638 | pA29668 |
| 639 | pA29669 |
| 640 | pA29671 |
| 641 | pA29672 |
| 642 | pA29673 |
| 643 | pA29675 |
| 644 | pA29676 |
| 645 | pA29677 |
| 646 | pA29678 |
| 647 | pA29679 |
| 648 | pA29680 |
| 649 | pA29681 |
| 650 | pA29682 |
| 651 | pA29683 |
| 652 | pA29684 |
| 653 | pA29685 |
| 654 | pA29686 |
| 655 | pA29687 |
| 656 | pA29688 |
| 657 | pA29689 |
| 658 | pA29690 |
| 659 | pA29692 |
| 660 | pA29693 |
| 661 | pA29694 |
| 662 | pA29695 |
| 663 | pA29696 |
| 664 | pA29697 |
| 665 | pA29698 |
| 666 | pA29699 |
| 667 | pA29700 |
| 668 | pA29701 |
| 669 | pA29702 |
| 670 | pA29703 |
| 671 | pA29704 |
| 672 | pA30015 |
| 673 | pA30016 |
| 674 | pA30017 |
| 675 | pA30018 |
| 676 | pA30019 |
| 677 | pA30020 |
| 678 | pA30021 |
| 679 | pA30022 |
| 680 | pA30023 |
| 681 | pA30024 |
| 682 | pA30025 |
| 683 | pA30026 |
| 684 | pA30027 |
| 685 | pA30028 |
| 686 | pA30029 |
| 687 | pA30030 |
| 688 | pA30031 |
| 689 | pA30032 |
| 690 | pA30033 |
| 691 | pA30034 |
| 692 | pA30035 |
| 693 | pA30036 |
| 694 | pA30037 |
| 695 | pA30038 |
| 696 | pA30039 |
| 697 | pA30040 |
| 698 | pA30041 |
| 699 | pA30042 |
| 700 | pA30044 |
| 701 | pA30045 |
| 702 | pA30046 |
| 703 | pA30047 |
| 704 | pA30048 |
| 705 | pA30049 |
| 706 | pA30050 |
| 707 | pA32939 |
| 708 | pA32940 |
| 709 | pA32941 |
| 710 | pA32942 |
| 711 | pA32943 |
| 712 | pA32944 |
| 713 | pA32945 |
| 714 | pA32946 |
| 715 | pA32947 |
| 716 | pA32948 |
| 717 | pA32949 |
| 718 | pA32950 |
| 719 | pA32951 |
| 720 | pA32952 |
| 721 | pA32953 |
| 722 | pA32954 |
| 723 | pA32955 |
| 724 | pA32956 |
| 725 | pA32957 |
| 726 | pA32958 |
| 727 | pA32959 |
| 728 | pA32960 |
| 729 | pA32962 |
| 730 | pA32963 |
| 731 | pA32965 |
| 732 | pA32966 |
| 733 | pA32967 |
| 734 | pA32968 |
| 735 | pA32969 |
| 736 | pA32970 |
| 737 | pA32971 |
| 738 | pA32972 |
| 739 | pA32973 |
| 740 | pA32977 |
| 741 | pA32978 |
| 742 | pA32979 |
| 743 | pA32980 |
| 744 | pA32981 |
| 745 | pA32982 |
| 746 | pA32983 |
| 747 | pA32984 |
| 748 | pA32985 |
| 749 | pA32987 |
| 750 | pA32988 |
| 751 | pA32989 |
| 752 | pA32990 |
| 753 | pA32991 |
| 754 | pA32992 |
| 755 | pA32993 |
| 756 | pA32994 |
| 757 | pA32995 |
| 758 | pA32996 |
| 759 | pA32997 |
| 760 | pA32998 |
| 761 | pA32999 |
| 762 | pA33000 |
| 763 | pA33001 |
| 764 | pA33002 |
| 765 | pA33004 |
| 766 | pA33005 |
| 767 | pA33006 |
| 768 | pA33007 |
| 769 | pA33008 |
| 770 | pA33009 |
| 771 | pA33010 |
| 772 | pA33011 |
| 773 | pA33012 |
| 774 | pA33014 |
| 775 | pA33015 |
| 776 | pA33016 |
| 777 | pA33017 |
| 778 | pA33018 |
| 779 | pA33019 |
| 780 | pA33020 |
| 781 | pA33021 |
| 782 | pA33023 |
| 783 | pA33024 |
| 784 | pA33025 |
| 785 | pA33027 |
| 786 | pA33028 |
| 787 | pA33029 |
| 788 | pA33030 |
| 789 | pA33031 |
| 790 | pA33032 |
| 791 | pA33033 |
| 792 | pA33035 |
| 793 | pA33036 |
| 794 | pA33037 |
| 795 | pA33038 |
| 796 | pA33040 |
| 797 | pA33041 |
| 798 | pA33042 |
| 799 | pA33043 |
| 800 | pA33044 |
| 801 | pA33046 |
| 802 | pA33047 |
| 803 | pA33048 |
| 804 | pA33051 |
| 805 | pA33053 |
| 806 | pA33054 |
| 807 | pA33056 |
| 808 | pA33057 |
| 809 | pA33058 |
| 810 | pA33059 |
| 811 | pA33060 |
| 812 | pA33061 |
| 813 | pA33063 |
| 814 | pA33065 |
| 815 | pA33066 |
| 816 | pA33067 |
| 817 | pA33068 |
| 818 | pA33069 |
| 819 | pA33070 |
| 820 | pA33071 |
| 821 | pA33074 |
| 822 | pA33075 |
| 823 | pA33076 |
| 824 | pA33077 |
| 825 | pA33078 |
| 826 | pA33079 |
| 827 | pA33080 |
| 828 | pA33081 |
| 829 | pA33082 |
| 830 | pA29819 |
| 831 | pA29820 |
| 832 | pA29821 |
| 833 | pA29822 |
| 834 | pA29823 |
| 835 | pA29824 |
| 836 | pA29825 |
| 837 | pA29826 |
| 838 | pA29827 |
| 839 | pA29828 |
| 840 | pA29829 |
| 841 | pA29830 |
| 842 | pA29831 |
| 843 | pA29832 |
| 844 | pA29833 |
| 845 | pA29834 |
| 846 | pA29835 |
| 847 | pA29836 |
| 848 | pA29837 |
| 849 | pA29838 |
| 850 | pA29839 |
| 851 | pA29840 |
| 852 | pA29841 |
| 853 | pA29842 |
| 854 | pA29843 |
| 855 | pA29844 |
| 856 | pA29845 |
| 857 | pA29846 |
| 858 | pA29847 |
| 859 | pA29848 |
| 860 | pA29849 |
| 861 | pA29850 |
| 862 | pA29851 |
| 863 | pA29852 |
| 864 | pA29853 |
| 865 | pA29854 |
| 866 | pA29855 |
| 867 | pA29856 |
| 868 | pA29857 |
| 869 | pA29858 |
| 870 | pA29859 |
| 871 | pA29860 |
| 872 | pA29861 |
| 873 | pA29862 |
| 874 | pA29863 |
| 875 | pA29864 |
| 876 | pA29865 |
| 877 | pA29866 |
| 878 | pA29867 |
| 879 | pA29868 |
| 880 | pA29869 |
| 881 | pA29870 |
| 882 | pA29871 |
| 883 | pA10142 |
| 884 | pA12546 |
| 885 | pA21838 |
| 886 | pA21839 |
| 887 | pA21840 |
| 888 | pA21841 |
| 889 | pA21842 |
| 890 | pA33240 |
| 891 | pA33241 |
| 892 | pA33242 |
| 893 | pA33244 |
| 894 | pA33246 |
| 895 | pA33247 |
| 896 | pA33248 |
| 897 | pA33249 |
| 898 | pA33250 |
| 899 | pA33252 |
| 900 | pA33253 |
| 901 | pA33254 |
| 902 | pA33255 |
| 903 | pA33258 |
| 904 | pA33259 |
| 905 | pA33260 |
| 906 | pA33261 |
| 907 | pA33262 |
| 908 | pA33263 |
| 909 | pA33264 |
| 910 | pA33267 |
| 911 | pA33269 |
| 912 | pA33270 |
| 913 | pA33271 |
| 914 | pA33272 |
| 915 | pA33273 |
| 916 | pA33274 |
| 917 | pA33276 |
| 918 | pA33278 |
| 919 | pA33279 |
| 920 | pA33280 |
| 921 | pA33281 |
| 922 | pA33282 |
| 923 | pA33285 |
| 924 | pA33286 |
| 925 | pA32582 |
| 926 | pA32586 |
| 927 | pA32589 |
| 928 | pA32591 |
| 929 | pA32594 |
| 930 | pA32595 |
| 931 | pA32596 |
| 932 | pA32600 |
| 933 | pA32601 |
| 934 | pA32602 |
| 935 | pA32603 |
| 936 | pA32605 |
| 937 | pA32606 |
| 938 | pA32608 |
| 939 | pA32609 |
| 940 | pA32614 |
| 941 | pA32616 |
| 942 | pA32620 |
| 943 | pA32622 |
| 944 | pA32623 |
| 945 | pA32625 |
| 946 | pA32629 |
| 947 | pA32639 |
| 948 | pA32650 |
| 949 | pA32651 |
| 950 | pA32652 |
| 951 | pA32655 |
| 952 | pA32657 |
| 953 | pA32659 |
| 954 | pA32661 |
| 955 | pA32662 |
| 956 | pA32663 |
| 957 | pA32664 |
| 958 | pA32665 |
| 959 | pA32666 |
| 960 | pA32667 |
| 961 | pA32668 |
| 962 | pA32669 |
| 963 | pA32670 |
| 964 | pA32671 |
| 965 | pA32672 |
| 966 | pA32675 |
| 967 | pA32678 |
| 968 | pA32680 |
| 969 | pA32682 |
| 970 | pA32684 |
| 971 | pA32686 |
| 972 | pA32688 |
| 973 | pA32690 |
| 974 | pA32692 |
| 975 | pA32696 |
| 976 | pA32697 |
| 977 | pA32698 |
| 978 | pA32700 |
| 979 | pA32701 |
| 980 | pA32702 |
| 981 | pA32704 |
| 982 | pA32706 |
| 983 | pA32708 |
| 984 | pA32712 |
| 985 | pA32715 |
| 986 | pA32716 |
| 987 | pA32717 |
| 988 | pA32719 |
| 989 | pA32721 |
| 990 | pA32723 |
| 991 | pA32731 |
| 992 | pA32732 |
| 993 | pA32734 |
| 994 | pA32736 |
| 995 | pA32737 |
| 996 | pA32739 |
| 997 | pA32748 |
| 998 | pA32750 |
| 999 | pA32754 |
| 1000 | pA32758 |
| 1001 | pA32767 |
| 1002 | pA32770 |
| 1003 | pA32779 |
| 1004 | pA32781 |
| 1005 | pA32787 |
| 1006 | pA32790 |
| 1007 | pA32793 |
| 1008 | pA32796 |
| 1009 | pA32797 |
| 1010 | pA32799 |
| 1011 | pA32800 |
| 1012 | pA32801 |
| 1013 | pA32802 |
| 1014 | pA32804 |
| 1015 | pA32806 |
| 1016 | pA32808 |
| 1017 | pA32816 |
| 1018 | pA32819 |
| 1019 | pA32820 |
| 1020 | pA32821 |
| 1021 | pA32824 |
| 1022 | pA32825 |
| 1023 | pA32826 |
| 1024 | pA32828 |
| 1025 | pA32831 |
| 1026 | pA32834 |
| 1027 | pA32835 |
| 1028 | pA32837 |
| 1029 | pA32842 |
| 1030 | pA32844 |
| 1031 | pA32845 |
| 1032 | pA32847 |
| 1033 | pA32848 |
| 1034 | pA32854 |
| 1035 | pA32855 |
| 1036 | pA32858 |
| 1037 | pA32863 |
| 1038 | pA32864 |
| 1039 | pA32865 |
| 1040 | pA32866 |
| 1041 | pA32868 |
| 1042 | pA32876 |
| 1043 | pA32880 |
| 1044 | pA32916 |
| 1045 | pA32919 |
| 1046 | pA32924 |
| 1047 | pA32926 |
| 1048 | pA32934 |
| 1049 | pA32632 |
| 1050 | pA32634 |
| 1051 | pA32638 |
| 1052 | pA32646 |
| 1053 | pA32653 |
| 1054 | pA32722 |
| 1055 | pA32724 |
| 1056 | pA32727 |
| 1057 | pA32729 |
| 1058 | pA32735 |
| 1059 | pA32738 |
| 1060 | pA32742 |
| 1061 | pA32743 |
| 1062 | pA32746 |
| 1063 | pA32747 |
| 1064 | pA32749 |
| 1065 | pA32751 |
| 1066 | pA32752 |
| 1067 | pA32757 |
| 1068 | pA32760 |
| 1069 | pA32761 |
| 1070 | pA32763 |
| 1071 | pA32765 |
| 1072 | pA32769 |
| 1073 | pA32775 |
| 1074 | pA32780 |
| 1075 | pA32782 |
| 1076 | pA32785 |
| 1077 | pA32791 |
| 1078 | pA32869 |
| 1079 | pA32871 |
| 1080 | pA32875 |
| 1081 | pA32879 |
| 1082 | pA32881 |
| 1083 | pA32882 |
| 1084 | pA32884 |
| 1085 | pA32885 |
| 1086 | pA32886 |
| 1087 | pA32888 |
| 1088 | pA32892 |
| 1089 | pA32894 |
| 1090 | pA32895 |
| 1091 | pA32902 |
| 1092 | pA32903 |
| 1093 | pA32904 |
| 1094 | pA32906 |
| 1095 | pA32908 |
| 1096 | pA32912 |
| 1097 | pA32913 |
| 1098 | pA32914 |
| 1099 | pA32917 |
| 1100 | pA32918 |
| 1101 | pA32922 |
| 1102 | pA32923 |
| 1103 | pA32930 |
| 1104 | pA32932 |
| 1105 | pA32579 |
| 1106 | pA32581 |
| 1107 | pA32583 |
| 1108 | pA32585 |
| 1109 | pA32587 |
| 1110 | pA32597 |
| 1111 | pA32599 |
| 1112 | pA32610 |
| 1113 | pA32613 |
| 1114 | pA32617 |
| 1115 | pA32619 |
| 1116 | pA32621 |
| 1117 | pA32627 |
| 1118 | pA32631 |
| 1119 | pA32633 |
| 1120 | pA32637 |
| 1121 | pA32641 |
| 1122 | pA32647 |
| 1123 | pA32656 |
| 1124 | pA32658 |
| 1125 | pA32673 |
| 1126 | pA32677 |
| 1127 | pA32679 |
| 1128 | pA32681 |
| 1129 | pA32683 |
| 1130 | pA32685 |
| 1131 | pA32689 |
| 1132 | pA32691 |
| 1133 | pA32693 |
| 1134 | pA32695 |
| 1135 | pA32711 |
| 1136 | pA32725 |
| 1137 | pA32740 |
| 1138 | pA32744 |
| 1139 | pA32764 |
| 1140 | pA32768 |
| 1141 | pA32772 |
| 1142 | pA32773 |
| 1143 | pA32774 |
| 1144 | pA32776 |
| 1145 | pA32777 |
| 1146 | pA32778 |
| 1147 | pA32795 |
| 1148 | pA32803 |
| 1149 | pA32805 |
| 1150 | pA32807 |
| 1151 | pA32809 |
| 1152 | pA32813 |
| 1153 | pA32815 |
| 1154 | pA32817 |
| 1155 | pA32827 |
| 1156 | pA32832 |
| 1157 | pA32833 |
| 1158 | pA32839 |
| 1159 | pA32841 |
| 1160 | pA32843 |
| 1161 | pA32849 |
| 1162 | pA32851 |
| 1163 | pA32853 |
| 1164 | pA32857 |
| 1165 | pA32859 |
| 1166 | pA32867 |
| 1167 | pA32872 |
| 1168 | pA32873 |
| 1169 | pA32887 |
| 1170 | pA32889 |
| 1171 | pA32891 |
| 1172 | pA32897 |
| 1173 | pA32901 |
| 1174 | pA32907 |
| 1175 | pA32911 |
| 1176 | pA32915 |
| 1177 | pA32920 |
| 1178 | pA32927 |
| 1179 | pA32929 |
| 1180 | pA32931 |
| 1181 | pA34086 |
| 1182 | pA34087 |
| 1183 | pA34088 |
| 1184 | pA34089 |
| 1185 | pA34090 |
| 1186 | pA34091 |
| 1187 | pA34092 |
| 1188 | pA34094 |
| 1189 | pA34095 |
| 1190 | pA34096 |
| 1191 | pA34097 |
| 1192 | pA34098 |
| 1193 | pA34099 |
| 1194 | pA34100 |
| 1195 | pA34101 |
| 1196 | pA34102 |
| 1197 | pA34103 |
| 1198 | pA34104 |
| 1199 | pA34105 |
| 1200 | pA34106 |
| 1201 | pA34107 |
| 1202 | pA34109 |
| 1203 | pA34110 |
| 1204 | pA34111 |
| 1205 | pA34112 |
| 1206 | pA34113 |
| 1207 | pA34115 |
| 1208 | pA34116 |
| 1209 | pA34117 |
| 1210 | pA34118 |
| 1211 | pA34119 |
| 1212 | pA34120 |
| 1213 | pA34121 |
| 1214 | pA34122 |
| 1215 | pA34123 |
| 1216 | pA34124 |
| 1217 | pA34125 |
| 1218 | pA34126 |
| 1219 | pA34127 |
| 1220 | pA34128 |
| 1221 | pA34129 |
| 1222 | pA34130 |
| 1223 | pA34131 |
| 1224 | pA34132 |
| 1225 | pA34133 |
| 1226 | pA34134 |
| 1227 | pA34135 |
| 1231 | pA35407 |
| 1232 | pA35408 |
| 1233 | pA35409 |
| 1234 | pA35410 |
| 1235 | pA35411 |
| 1236 | pA35412 |
| 1237 | pA35413 |
| 1238 | pA35414 |
| 1239 | pA35415 |
| 1240 | pA35416 |
| 1241 | pA35417 |
| 1242 | pA35418 |
| 1243 | pA35419 |
| 1244 | pA35420 |
| 1245 | pA35421 |
| 1246 | pA35422 |
| 1247 | pA35423 |
| 1248 | pA35424 |
| 1249 | pA35425 |
| 1250 | pA35426 |
| 1251 | pA35427 |
| 1252 | pA35428 |
| 1253 | pA35429 |
| 1254 | pA35430 |
| 1255 | pA35431 |
| 1256 | pA35432 |
| 1257 | pA35434 |
| 1258 | pA35435 |
| 1259 | pA35436 |
| 1260 | pA35437 |
| 1261 | pA35438 |
| 1262 | pA35439 |
| 1263 | pA35440 |
| 1264 | pA35441 |
| 1265 | pA35442 |
| 1266 | pA35443 |
| 1267 | pA35444 |
| 1268 | pA35872 |
| 1269 | pA35873 |
| 1270 | pA35874 |
| 1271 | pA35875 |
| 1272 | pA35876 |
| 1273 | pA35877 |
| 1274 | pA35878 |
| 1275 | pA35879 |
| 1276 | pA35880 |
| 1277 | pA35881 |
| 1278 | pA35882 |
| 1279 | pA35884 |
| 1280 | pA35886 |
| 1281 | pA35887 |
| 1282 | pA35888 |
| 1283 | pA35889 |
| 1284 | pA35890 |
| 1285 | pA35891 |
| 1286 | pA35892 |
| 1287 | pA35893 |
| 1288 | pA35895 |
| 1289 | pA35896 |
| 1290 | pA35897 |
| 1291 | pA35898 |
| 1292 | pA35899 |
| 1293 | pA35901 |
| 1294 | pA35902 |
| 1295 | pA35903 |
| 1296 | pA35904 |
| 1297 | pA35905 |
| 1298 | pA35906 |
| 1299 | pA35907 |
| 1300 | pA35908 |
| 1301 | pA35909 |
| 1302 | pA35910 |
| 1303 | pA35911 |
| 1304 | pA35912 |
| 1305 | pA35913 |
| 1306 | pA35914 |
| 1307 | pA35915 |
| 1308 | pA35916 |
| 1309 | pA35917 |
| 1310 | pA35919 |
| 1311 | pA35921 |
| 1312 | pA35922 |
| 1313 | pA35923 |
| 1314 | pA35924 |
| 1315 | pA35925 |
| 1316 | pA35926 |
| 1317 | pA35927 |
| 1318 | pA35928 |
| 1319 | pA35929 |
| 1320 | pA35930 |
| 1321 | pA35931 |
| 1322 | pA35932 |
| 1323 | pA35933 |
| 1324 | pA35935 |
| 1325 | pA35936 |
| 1326 | pA35937 |
| 1327 | pA35938 |
| 1328 | pA35939 |
| 1329 | pA35940 |
| 1330 | pA35941 |
| 1331 | pA35942 |
| 1332 | pA35943 |
| 1333 | pA35481 |
| 1334 | pA35482 |
| 1335 | pA35483 |
| 1336 | pA35484 |
| 1337 | pA35485 |
| 1338 | pA35486 |
| 1339 | pA35487 |
| 1340 | pA35488 |
| 1341 | pA35489 |
| 1342 | pA35490 |
| 1343 | pA35491 |
| 1344 | pA35492 |
| 1345 | pA35493 |
| 1346 | pA35494 |
| 1347 | pA35495 |
| 1348 | pA35496 |
| 1349 | pA35497 |
| 1350 | pA35498 |
| 1351 | pA35499 |
| 1352 | pA35500 |
| 1353 | pA35501 |
| 1354 | pA35502 |
| 1355 | pA35503 |
| 1356 | pA35504 |
| 1357 | pA35505 |
| 1358 | pA35506 |
| 1359 | pA35507 |
| 1360 | pA35508 |
| 1361 | pA35509 |
| 1362 | pA35510 |
| 1363 | pA35511 |
| 1364 | pA35512 |
| 1365 | pA35513 |
| 1366 | pA35514 |
| 1367 | pA35515 |
| 1368 | pA35516 |
| 1369 | pA35517 |
| 1370 | pA35518 |
| 1371 | pA35519 |
| 1372 | pA35520 |
| 1373 | pA35521 |
| 1374 | pA35522 |
| 1375 | pA35523 |
| 1376 | pA35524 |
| 1377 | pA35525 |
| 1378 | pA35526 |
| 1379 | pA35527 |
| 1380 | pA35528 |
| 1381 | pA35529 |
| 1382 | pA35530 |
| 1383 | pA35531 |
| 1384 | pA35532 |
| 1385 | pA35533 |
| 1386 | pA35534 |
| 1387 | pA35535 |
| 1388 | pA35536 |
| 1389 | pA35537 |
| 1390 | pA35538 |
| 1391 | pA35539 |
| 1392 | pA35540 |
| 1393 | pA35541 |
| 1394 | pA35542 |
| 1395 | pA35543 |
| 1396 | pA35544 |
| 1397 | pA35545 |
| 1398 | pA35546 |
| 1399 | pA35547 |
| 1400 | pA35548 |
| 1401 | pA35549 |
| 1402 | pA35550 |
| 1403 | pA35551 |
| 1404 | pA35552 |
| 1405 | pA35553 |
| 1406 | pA35554 |
| 1407 | pA35555 |
| 1408 | pA35556 |
| 1409 | pA35557 |
| 1410 | pA35558 |
| 1411 | pA35559 |
| 1412 | pA35560 |
| 1413 | pA35561 |
| 1414 | pA35562 |
| 1415 | pA35563 |
| 1416 | pA35564 |
| 1417 | pA35565 |
| 1418 | pA35566 |
| 1419 | pA35567 |
| 1420 | pA35568 |
| 1421 | pA35569 |
| 1422 | pA35570 |
| 1423 | pA35571 |
| 1424 | pA35572 |
| 1425 | pA35573 |
| 1426 | pA35574 |
| 1427 | pA35575 |
| 1428 | pA35576 |
| 1429 | pA35577 |
| 1430 | pA35578 |
| 1431 | pA35579 |
| 1432 | pA35580 |
| 1433 | pA35581 |
| 1434 | pA35582 |
| 1435 | pA35583 |
| 1436 | pA35584 |
| 1437 | pA35585 |
| 1438 | pA35586 |
| 1439 | pA35587 |
| 1440 | pA35588 |
| 1441 | pA35589 |
| 1442 | pA35590 |
| 1443 | pA35591 |
| 1444 | pA35592 |
| 1445 | pA35593 |
| 1446 | pA35594 |
| 1447 | pA35595 |
| 1448 | pA35596 |
| 1449 | pA35597 |
| 1450 | pA35598 |
| 1451 | pA35599 |
| 1452 | pA35600 |
| 1453 | pA35601 |
| 1454 | pA35602 |
| 1455 | pA35603 |
| 1456 | pA35604 |
| 1457 | pA35605 |
| 1458 | pA35606 |
| 1459 | pA35607 |
| 1460 | pA35608 |
| 1461 | pA35609 |
| 1462 | pA35610 |
| 1463 | pA35611 |
| 1464 | pA35612 |
| 1465 | pA35613 |
| 1466 | pA35614 |

### EXAMPLES

### Example 1: In Vivo Production of Native Beta-1,2-Glycosyltransferases (B12GTs)

[0075] Polynucleotides encoding the amino acid sequences for known beta-1,2-UDP-glycosyl-transferases from five different organisms (Table 1.1) were synthesized (Twist Bioscience) and inserted into the pARZ4 expression vector. Polynucleotides were either ordered as full-length genes or ordered as gene fragments and then assembled using Gibson assembly. The recombinant vectors were used in a heat shock method to transform E. coli HMS174 (DE3) (Novagen), thereby preparing recombinant microorganisms.

[0076] Each transformed recombinant microorganism was inoculated to 1 ml LB-kanamycin medium, cultured by shaking at 37° C. overnight. The culture was inoculated to 5 ml TB-kanamycin medium and grown for 2 hours at 37° C., followed by 25° C. for 1 hour. The culture was induced with 50 uL 50 mM IPTG and grown overnight. Finally, the culture was centrifuged at top-speed for 5 minutes and stored at −80° C.

TABLE 1.1
Native Beta-1,2-UDP-Glycosyltransferases

| PlasmidID | Organism |
|---|---|
| pA10132 | Oryza sativa subsp. japonica (Rice) |
| pA10143 | Solanum lycopersicum (Tomato) |
| pA12549 | Lycium barbarum (Barbary matrimony-vine) |
| pA12550 | Solanum lycopersicum (Tomato) |
| pA28422 | Solanum tuberosum (Potato) |

### Example 2: Purification of Beta-1,2-Glycosyltransferases (B12GTs)

[0077] The microorganisms created in Example I were dissolved in a lysis buffer (lysozyme, DNAseI, Bugbuster, 300 mL 20 mM HEPES pH 7.5, 500 mM NaCl, and 20 mM Imidazole). Two to three glass beads were added to each well and were disrupted by shaking at 25° C. and 220 rpm for 30 minutes. The disrupted liquid was centrifuged at 2200×g for 6-10 minutes. The obtained supernatant was loaded onto a Ni-NTA plate and shaken for 10 minutes at room temperature. The plate was centrifuged for 4 minutes at 100×g followed by two washes of 500 uL binding buffer (300 mL 20 mM HEPES pH 7.5, 500 mM NaCl, 20 mM Imidazole) and two-minute centrifugation (500×g). The proteins were eluted with 150 uL elution buffer (15 mL 20 mM HEPES pH 7.5, 500 mM NaCl, 500 mM Imidazole) and shaken for 1 minute at 0.25 maximum shaking speed followed by centrifugation for 2 minutes at 500×g. The recovered protein was desalted into a buffer solution for enzyme activity evaluation (50 mM HEPES pH 7.5, 50 mM NaCl).

### Example 3: Measure Beta-1,2-Glycosyltransferase (B12GT) Activity with ADP-Glucose and GDP-Glucose

[0078] The wild-type beta-1,2-UDP-glycosyltransferases, pA10132, pA10143 and pA12549, were assayed for activity with ADP-glucose and GDP-glucose. Purified protein was reacted with 0.5 mM RA99 (99% Pure Reb A), 2 mM NDP-glucose (ADP-glucose or GDP-glucose) in 50 mM MOPS pH 7.8 buffer for 72 hours at 30° C. Conversion of Reb A to Reb D, as schematized in FIG. 1, was monitored by liquid chromatography-mass spectrometry (LCMS) using an Agilent 6470 QQQ mass spectrometer (column: Waters ACQUITY UPLC HSS T3 Column, 100 mm×2.1 mm). The QQQ was run with multi reaction monitoring (MS/MS) to accurately quantitate steviol glycosides of interest. All three wild-type B12GTs had minimal Reb A to Reb D activity when using ADP-glucose or GDP-glucose as the reaction sugar donor (FIG. 2).

### Example 4: In Vivo Production of Native Sucrose Synthases

[0079] Polynucleotides encoding the amino acid sequences for sucrose synthases (SuSys) from seven different organisms (Table 2) were synthesized (Twist Bioscience) and inserted into the pARZ4 expression vector. Polynucleotides were either ordered as full-length genes or ordered as gene fragments and then assembled using Gibson assembly. The recombinant vectors were used in a heat shock method to transform E. coli NEBT7EL (New England Biolabs), thereby preparing recombinant microorganisms.

[0080] Each transformed recombinant microorganism was inoculated to 1 ml LB-kanamycin medium, cultured by shaking at 37° C. overnight. The culture was inoculated to 5 ml TB-kanamycin medium and grown for 2 hours at 37° C., followed by 25° C. for 1 hour. The culture was induced with 50 uL 50 mM IPTG and grown overnight. Finally, the culture was centrifuged at top-speed for 5 minutes and stored at −80° C.

TABLE 2
Wildtype Sucrose Synthase Sequences

| PlasmidID | Organism |
|---|---|
| pA10142 | Arabidopsis thaliana |
| pA12546 | Coffea arabica |
| pA21838 | Acidithiobacillus caldus |
| pA21839 | Nitrosomonas europaea |
| pA21840 | Denitrovibrio acetiphilus |
| pA21841 | Thermosynechococcus elongatus |
| pA21842 | Oryza sativa subsp. japonica (Rice) |

### Example 5: Purification of Native Sucrose Synthases

[0081] The microorganisms created in Example 4 were dissolved in a lysis buffer (lysozyme, DNAseI, Bugbuster, 300 mL 20 mM HEPES pH 7.5, 500 mM NaCl, and 20 mM Imidazole). Two to three glass beads were added to each well and were disrupted by shaking at 25° C. and 220 rpm for 30 minutes. The disrupted liquid was centrifuged at 2200×g for 6-10 minutes. The obtained supernatant was loaded onto a Ni-NTA plate and shaken for 10 minutes at room temperature. The plate was centrifuged for 4 minutes at 100×g followed by two washes of 500 uL binding buffer (300 mL 20 mM HEPES pH 7.5, 500 mM NaCl, 20 mM Imidazole) and two-minute centrifugation (500×g). The proteins were eluted with 150 uL elution buffer (15 mL 20 mM HEPES pH 7.5, 500 mM NaCl, 500 mM Imidazole) and shaken for 1 minute at 0.25 maximum shaking speed followed by centrifugation for 2 minutes at 500×g. The recovered protein was desalted into a buffer solution for enzyme activity evaluation (50 mM MOPS pH 6.5, 50 mM NaCl).

### Example 6: Measure Sucrose Synthase Activity with UDP, GDP and ADP

[0082] Purified enzyme from Example 5 was reacted with 50 mM sucrose and 5 mM nucleotide (ADP, GDP or UDP) in 50 mM MOPS buffer (pH 6.5) and 50 mM NaCl for 24 hours at 60° C. Conversion of NDP to NDP-glucose was monitored by liquid chromatography-mass spectrometry (LCMS) using an Agilent 6545 QTOF mass spectrometer (column: Agilient HILIC-OH 150×2.1 mm). The wild-type sucrose synthases were active on all three nucleotides (FIG. 3).

### Example 7: Conversion of Reb A to Reb D in a One-Pot Reaction

[0083] One-pot reactions containing a B12GT and a SuSy were conducted to demonstrate the ability to convert Reb A to Reb D using ADP-glucose generated by the SuSy. Purified B12GT (pA10143 (FIG. 4 (top)) or pA12549 (FIG. 4 (bottom))) and purified SuSy (pA10142, pA12546, pA21838, pA21839, pA21840, pA21841, or pA21842) were reacted with 0.5 mg/mL RA99, 50 mM Sucrose, and 5 mM ADP in 50 mM pH 6.5 MOPS buffer, 3.0 mM MgCl₂ and 50 mM NaCl for 24 hours at 30° C. Product rebaudiosides were monitored by LCMS similar to Example 3. All one-pot reactions were able to generate Reb D from Reb A (FIG. 4). The one-pot reactions containing pA10143 further converted the generated Reb D to Reb M2.

### Example 8: Improved Activity of pA10143 by Site-Saturation Mutagenesis

[0084] Homology models of the B12GT encoded by pA10143 were generated and used to identify the active site residues of the protein. The following twenty active site residue positions were chosen for site-saturation mutagenesis: 81, 82, 88, 139, 178, 185, 260, 284, 317, 320, 324, 332, 336, 339, 341, 358, 359, 360, 362, 363. Gibson assembly using bridging oligos was used to create 217 single point mutant variants of pA10143 (SEQ ID NOs: 6-222). Each B12GT variant was expressed and purified as in Example 2. Each B12GT variant was assayed in a one-pot reaction with the SuSy, pA10142. The purified B12GT and SuSy were reacted with 4 mg/mL RA50, 40 mM Sucrose, and 1 mM ADP in 50 mM pH 7 phosphate buffer, 3.0 mM MgCl₂ and 50 mM NaCl for 24 hours at 30° C. Product rebaudiosides were monitored by LCMS similar to Example 3. Several variants showed improved activity compared to the parent pA10143 (FIG. 5). Active site positions 358, 341 and 317 had the greatest improvements in activity (FIG. 6).

### Example 9: Improved Activity of pA10143 by Computational Design

[0085] Homology models of the B12GT encoded by pA10143 were used as input to computational designs to improve pA10143. Computational designs were conducted to improve the stability and expression of the B12GT. Ninety-three computational designs were chosen for experimental validation (SEQ ID NOs: 223-315). Expression plasmids for the computational designs were built as in Example 1. Each B12GT variant was expressed and purified as in Example 2. Each B12GT variant was assayed in a one-pot reaction with the SuSy, pA10142. The purified B12GT and SuSy were reacted with 4 mg/mL RA50, 40 mM Sucrose, and 1 mM ADP in 50 mM pH 7 phosphate buffer, 3.0 mM MgCl₂ and 50 mM NaCl for 24 hours at 30° C. Product rebaudiosides were monitored by LCMS similar to Example 3. Several variants showed improved expression and/or Reb D conversion compared to the parent pA10143 (18% conversion, 39 uM purified protein; Table 3).

TABLE 3
Top Computational Designs of pA10143

| | | Purified |
|---|---|---|
| ID | % Conversion | Conc (uM) |
| pA29938 | 60.5 | 79.2 |
| pA29923 | 44.5 | 24.6 |
| pA29955 | 34.5 | 48 |
| pA29979 | 34.4 | 56.4 |
| pA29977 | 25.9 | 68 |
| pA29983 | 25.7 | 65.3 |
| pA29920 | 25.3 | 21.3 |
| pA29932 | 25 | 74.1 |
| pA29934 | 22 | 54.6 |
| pA29939 | 21.8 | 38.5 |
| pA29953 | 18.4 | 42.7 |
| pA29918 | 16.1 | 119.5 |
| pA29984 | 14 | 32.6 |
| pA29967 | 13.3 | 38.2 |
| pA30006 | 12.7 | 10 |
| pA29957 | 11.2 | 22.5 |
| pA29963 | 10.4 | 23.2 |
| pA29944 | 9.5 | 64.5 |
| pA29961 | 9.1 | 28 |
| pA29916 | 8 | 35.5 |
| pA29949 | 7.9 | 36.4 |
| pA29966 | 7.9 | 22.8 |
| pA29951 | 7.8 | 45.6 |
| pA30008 | 7.7 | 7.6 |
| pA29921 | 7.4 | 15.2 |
| pA29981 | 7.1 | 39.8 |
| pA29973 | 6.7 | 33.2 |
| pA29995 | 5.2 | 61.9 |
| pA29985 | 5 | 65.1 |
| pA29969 | 4.8 | 22.6 |
| pA29950 | 4.8 | 46.2 |
| pA29931 | 4.7 | 22.5 |
| pA29968 | 4.6 | 51.1 |
| pA29933 | 4.6 | 8.6 |
| pA30007 | 4.6 | 8 |
| pA29917 | 4.5 | 26.6 |
| pA29992 | 4.4 | 37.7 |
| pA29978 | 4.4 | 44.6 |
| pA29960 | 4.3 | 19 |
| pA29986 | 4.3 | 17.5 |
| pA29919 | 3.8 | 14.3 |
| pA29942 | 3.7 | 43.3 |
| pA29954 | 3.6 | 10.8 |
| pA29970 | 3.5 | 13.4 |
| pA29996 | 3.4 | 39.8 |
| pA29922 | 2.9 | 13.2 |
| pA29990 | 2.7 | 35.5 |
| pA29926 | 2.5 | 81 |
| pA29991 | 2.4 | 52.8 |
| pA29964 | 2.3 | 14 |
| pA29987 | 2.2 | 67.6 |
| pA29937 | 2.1 | 10.4 |
| pA29925 | 1.5 | 21.9 |
| pA30003 | 1.5 | 30.4 |
| pA29952 | 1.4 | 9.1 |
| pA29941 | 1.4 | 9.8 |
| pA29993 | 1.3 | 55.7 |
| pA29971 | 1.3 | 11.1 |
| pA29998 | 1.2 | 32.3 |
| pA29935 | 1.2 | 14.6 |
| pA30005 | 1.2 | 6.5 |
| pA30001 | 1 | 37.6 |
| pA29945 | 1 | 7.7 |
| pA29962 | 1 | 6.3 |
| pA29948 | 1 | 9.8 |
| pA29980 | 0.9 | 14 |
| pA29959 | 0.9 | 38.5 |
| pA29976 | 0.8 | 17.8 |
| pA29927 | 0.7 | 12 |
| pA29989 | 0.7 | 35.3 |
| pA29946 | 0.6 | 9.8 |
| pA29928 | 0.6 | 39.5 |
| pA29947 | 0.6 | 8.9 |
| pA29924 | 0.4 | 130.4 |
| pA29972 | 0.4 | 56.6 |
| pA30009 | 0.3 | 6.4 |
| pA29982 | 0.3 | 33 |

[0086] Computational designs of pA10143 were also conducted to improve the stability and expression of the B12GT using coevolutionary information. Sixty computational designs were chosen for experimental validation (SEQ ID NOs: 316-375). Expression plasmids for the computational designs were built as in Example 1. Each B12GT variant was expressed and purified as in Example 2. Each B12GT variant was assayed in a one-pot reaction with the SuSy, pA10142. The purified B12GT and SuSy were reacted with 4 mg/mL RA50, 40 mM Sucrose, and 1 mM ADP in 50 mM pH 7 phosphate buffer, 3.0 mM MgCl₂ and 50 mM NaCl for 24 hours at 30° C. Product rebaudiosides were monitored by LCMS similar to Example 3. Computational design variants showed improved expression and/or Reb D conversion compared to the parent pA10143 (4.7% conversion, 35 uM purified protein; Table 4).

TABLE 4
Top Computational Designs of pA10143

| | | Purified |
|---|---|---|
| ID | % Conversion | Conc (uM) |
| pA29711 | 6.7 | 45.4 |
| pA29743 | 5.9 | 18.6 |
| pA29733 | 5.6 | 27.8 |
| pA29734 | 5.1 | 5.4 |
| pA29713 | 3 | 20 |
| pA29717 | 2.3 | 41.6 |
| pA29729 | 2.1 | 12.4 |
| pA29745 | 2.1 | 40.2 |
| pA29741 | 1.6 | 27.7 |
| pA29742 | 1.5 | 7.5 |
| pA29723 | 1.3 | 30.4 |
| pA29763 | 1.3 | 24.7 |
| pA29719 | 1.1 | 29.3 |
| pA29747 | 0.9 | 34.4 |
| pA29735 | 0.9 | 21.1 |
| pA29765 | 0.8 | 23.7 |
| pA29740 | 0.8 | 12.5 |
| pA29707 | 0.7 | 36.8 |
| pA29751 | 0.7 | 28.3 |
| pA29720 | 0.7 | 23.2 |
| pA29705 | 0.7 | 38 |
| pA29715 | 0.7 | 30 |
| pA29760 | 0.7 | 18.2 |
| pA29721 | 0.6 | 11.3 |
| pA29757 | 0.5 | 27.6 |
| pA29749 | 0.5 | 16.1 |
| pA29709 | 0.5 | 45.5 |
| pA29710 | 0.4 | 6.4 |
| pA29759 | 0.4 | 24.5 |
| pA29712 | 0.4 | 4.5 |
| pA29764 | 0.4 | 0.6 |
| pA29744 | 0.4 | 26 |
| pA29736 | 0.4 | 24.8 |
| pA29727 | 0.4 | 21.2 |
| pA29737 | 0.4 | 31.1 |
| pA29738 | 0.4 | 9.6 |
| pA29725 | 0.4 | 19.8 |
| pA29728 | 0.3 | 17.6 |
| pA29731 | 0.3 | 3.2 |
| pA29752 | 0.3 | 26.6 |
| pA29718 | 0.3 | 3.4 |
| pA29753 | 0.3 | 36.6 |
| pA29746 | 0.2 | 3.6 |
| pA29730 | 0.2 | 1.9 |
| pA29750 | 0.2 | 1.6 |
| pA29748 | 0.2 | 2.7 |
| pA29722 | 0.2 | ND |
| pA29756 | 0.1 | 1.7 |
| pA29724 | 0.1 | ND |
| pA29761 | 0.1 | 35.3 |
| pA29708 | 0.1 | 1.7 |
| pA29758 | 0.1 | 6.9 |
| pA29732 | 0.1 | ND |

[0087] Computational designs of pA10143 were also conducted to combine active site mutations. Nine computational designs were chosen for experimental validation (SEQ ID NOs: 376-384). Expression plasmids for the computational designs were built as in Example 1. Each B12GT variant was expressed and purified as in Example 2. Each B12GT variant was assayed in a one-pot reaction with the SuSy, pA10142. The purified B12GT and SuSy were reacted with 4 mg/mL RA50, 40 mM Sucrose, and 1 mM ADP in 50 mM pH 7 phosphate buffer, 3.0 mM MgCl₂ and 50 mM NaCl for 24 hours at 30° C. Product rebaudiosides were monitored by LCMS similar to Example 3. The top design, pA32576, showed activity comparable to the parent pA10143 (21% conversion; Table 5).

TABLE 5
Top Computational Designs of pA10143

| | | Purified |
|---|---|---|
| ID | % Conversion | Conc (uM) |
| pA32576 | 20.1 | 63.1 |
| pA32568 | 0.9 | 20 |
| pA32572 | 0.7 | 21.8 |
| pA32569 | 0.7 | 25.2 |
| pA32571 | 0.6 | 18.7 |
| pA32570 | 0.6 | 24.5 |
| pA32573 | 0.5 | 24.3 |
| pA32567 | 0.5 | 21.7 |
| pA32574 | 0.3 | 14.7 |

[0088] Computational designs of pA10143 were also conducted to combine additional mutations. Seventy-five computational designs were chosen for experimental validation (SEQ ID NOs: 385-459). Expression plasmids for the computational designs were built as in Example 1. Each B12GT variant was expressed and purified as in Example 2. Each B12GT variant was assayed in a one-pot reaction with the SuSy, pA10142. The purified B12GT and SuSy were reacted with 4 mg/mL RA50, 40 mM Sucrose, and 1 mM ADP in 50 mM pH 7 phosphate buffer, 3.0 mM MgCl₂ and 50 mM NaCl for 24 hours at 30° C. Product rebaudiosides were monitored by LCMS similar to Example 3. Computational design variants showed Reb A to Reb D conversion (Table 6).

TABLE 6
Top Computational Designs of pA10143

| | | Purified |
|---|---|---|
| ID | % Conversion | Conc (uM) |
| pA33106 | 3.9 | 9.4 |
| pA33091 | 2.7 | 11.8 |
| pA33123 | 2.2 | 10.2 |
| pA33137 | 1.1 | 57.5 |
| pA33154 | 0.7 | 15.8 |
| pA33149 | 0.6 | 14.7 |
| pA33088 | 0.6 | 13.4 |
| pA33086 | 0.5 | 17.3 |
| pA33110 | 0.5 | 19.7 |
| pA33083 | 0.2 | 21.9 |
| pA33085 | 0.1 | 15.3 |
| pA33165 | 0.1 | 17.2 |

### Example 10: Improved Activity of pA12549 by Computational Design

[0089] Homology models of the B12GT encoded by pA12549 were used as input to computational designs to improve pA12549. Computational designs of pA12549 were conducted to combine active site mutations known to be beneficial in homologous B12GTs. Eight computational designs were chosen for experimental validation (SEQ ID NOs: 460-467). Expression plasmids for the computational designs were built as in Example 1. Each B12GT variant was expressed and purified as in Example 2. Each B12GT variant was assayed in a one-pot reaction with the SuSy, pA10142. The purified B12GT and SuSy were reacted with 0.5 mg/mL RA99, 10 mM Sucrose, and 1 mM ADP in 50 mM pH 7 phosphate buffer, 3.0 mM MgCl₂ and 50 mM NaCl for 24 hours at 30° C. Product rebaudiosides were monitored by LCMS similar to Example 3. Several variants showed improved expression and/or Reb D conversion compared to the parent pA12549 (Table 7).

TABLE 7
Top pA12549 Computational Designs

| | | Purified |
|---|---|---|
| ID | % Conversion | Conc (uM) |
| pA32563 | 12.7 | 9.2 |
| pA32562 | 8 | 6.8 |
| pA32565 | 6.5 | 38.9 |
| pA32560 | 4.6 | 10.1 |
| pA32566 | 4.5 | 11.2 |
| pA32558 | 3.6 | 11.6 |
| pA32559 | 1.7 | 12.1 |

[0090] Computational designs of pA12549 were also conducted to combine mutations known to be beneficial in homologous B12GTs. Sixty-seven computational designs were chosen for experimental validation (SEQ ID NOs: 468-534). Expression plasmids for the computational designs were built as in Example 1. Each B12GT variant was expressed and purified as in Example 2. Each B12GT variant was assayed in a one-pot reaction with the SuSy, pA10142. The purified B12GT and SuSy were reacted with 0.5 mg/mL RA99, 10 mM Sucrose, and 1 mM ADP in 50 mM pH 7 phosphate buffer and 50 mM NaCl for 24 hours at 30° C. Product rebaudiosides were monitored by LCMS similar to Example 3. One computational design variant showed an improvement in Reb A to Reb D conversion (Table 8).

TABLE 8
Top pA12549 Computational Designs

| | | Purified |
|---|---|---|
| ID | % Conversion | Conc (uM) |
| pA33202 | 25.2 | 11.4 |
| pA33194 | 6.6 | 16.7 |
| pA33196 | 5.3 | 14.1 |
| pA33236 | 4.8 | 14.1 |
| pA33200 | 4.2 | 8.8 |
| pA33223 | 3 | 6.1 |
| pA33177 | 1.9 | 9.9 |
| pA33217 | 1.8 | 22.7 |
| pA33205 | 1.7 | 10.6 |
| pA33229 | 1.3 | 11 |
| pA33176 | 1 | 16.7 |
| pA33235 | 0.9 | 14.4 |
| pA33174 | 0.5 | 15.2 |
| pA33185 | 0.5 | 15.3 |
| pA33171 | 0.5 | 15.8 |
| pA33173 | 0.5 | 9.5 |
| pA33220 | 0.4 | 7.8 |
| pA33204 | 0.4 | 11.3 |
| pA33180 | 0.3 | 10.5 |
| pA33186 | 0.3 | 5.9 |
| pA33172 | 0.3 | 13.7 |
| pA33179 | 0.3 | 11.7 |
| pA33175 | 0.2 | 10.8 |
| pA33182 | 0.2 | 15.1 |
| pA33232 | 0.2 | 18 |

### Example 11: Improved Activity and Expression of the SUS1 from Arabidopsis thaliana by Computational Design

[0091] The crystal structure of SUS1 from Arabidopsis thaliana was used as input to computational designs to improve pA10142. Computational designs were conducted to improve the stability and expression of the SuSy. Thirty-five computational designs were chosen for experimental validation (SEQ ID NOs: 890-924). Expression plasmids for the computational designs were built as in Example 1. Each SuSy variant was expressed and purified as in Example 2. Each SuSy variant was assayed in a one-pot reaction with the B12GT, pA10143. The purified B12GT and SuSy were reacted with 4 mg/mL RA50, 40 mM Sucrose, and 1 mM ADP in 50 mM pH 7 phosphate buffer and 50 mM NaCl for 24 hours at 30° C. Product rebaudiosides were monitored by LCMS similar to Example 3. Several variants showed improved expression and/or Reb D conversion compared to the parent pA10142. The top designs showed up to a 2-fold improvement in yield and 3-fold improvement in expression (43% conversion, 8 uM purified protein; Table 9).

TABLE 9
Top Computational Designs of pA10142

| | | Purified |
|---|---|---|
| ID | % Conversion | Conc (uM) |
| pA33271 | 79.8 | 23.2 |
| pA33264 | 79.7 | 11.3 |
| pA33276 | 79 | 17.5 |
| pA33273 | 78.1 | 11.2 |
| pA33272 | 77.9 | 8.8 |
| pA33279 | 77.6 | 24.6 |
| pA33281 | 76.6 | 18.8 |
| pA33248 | 76.4 | 32.9 |
| pA33263 | 76.3 | 19.8 |
| pA33285 | 75.9 | 17.2 |
| pA33247 | 75.4 | 26.6 |
| pA33261 | 74.5 | 12.1 |
| pA33240 | 74 | 20.5 |
| pA33262 | 74 | 21 |
| pA33260 | 72.7 | 8.8 |
| pA33259 | 71 | 23.7 |
| pA33280 | 70.2 | 26.1 |
| pA33267 | 70 | 20 |
| pA33282 | 70 | 21.7 |
| pA33269 | 68.3 | 12.5 |
| pA33242 | 65.5 | 17.6 |
| pA33254 | 64.8 | 15.9 |
| pA33241 | 62.8 | 22.8 |
| pA33274 | 57.8 | 8.6 |
| pA33270 | 57.1 | 12.2 |
| pA33244 | 45.7 | 26 |
| pA33278 | 44.8 | 9.4 |
| pA33258 | 42.3 | 25.1 |
| pA33286 | 38.1 | 13 |
| pA33249 | 26.4 | 16 |
| pA33246 | 20.8 | 24.5 |
| pA33250 | 16.8 | 15.1 |
| pA33253 | 10.6 | 2.8 |
| pA33255 | 1.6 | 11.2 |
| pA33252 | 0.3 | 4.5 |

### Example 12: Computational Design of ADP-Glucose Dependent B12GTs

[0092] Structural models of a B12GT variant of pA28422 were generated and used as the starting point for computational designs. Computational designs were conducted to improve the stability and expression of the B12GT. Fifty-two computational designs were chosen for experimental validation (SEQ ID NOs: 535-586). Expression plasmids for the computational designs were built as in Example 1. Each B12GT variant was expressed and purified as in Example 2. Each B12GT variant was assayed in a one-pot reaction with a SuSy variant of pA21838. The purified B12GT and SuSy were reacted with 100 mg/mL RA50, 250 mM Sucrose, and 0.5 mM ADP in 50 mM pH 6 phosphate buffer, 3 mM MgCl₂ and 50 mM NaCl for 24 hours at 60° C. Product rebaudiosides were monitored by LCMS similar to Example 3. Several designed enzymes expressed well and were active for Reb A to Reb D conversion (Table 10).

TABLE 10
Top B12GT Computational Designs

| | | Purified |
|---|---|---|
| ID | % Conversion | Conc (uM) |
| pA29798 | 76.1 | 57.3 |
| pA29781 | 67.1 | 51.9 |
| pA29807 | 64.9 | 17.9 |
| pA29795 | 61.7 | 64.8 |
| pA29796 | 57.8 | 74.3 |
| pA29771 | 54.3 | 49.3 |
| pA29775 | 53.6 | 67 |
| pA29770 | 45 | 61 |
| pA29808 | 43.4 | 95.1 |
| pA29774 | 42.8 | 86.8 |
| pA29784 | 38.5 | 44.1 |
| pA29767 | 33.8 | 37 |
| pA29801 | 16.9 | 74.7 |
| pA29779 | 13 | 39.6 |
| pA29773 | 12 | 49.7 |
| pA29800 | 9.4 | 95.8 |
| pA29799 | 9.3 | 39.7 |
| pA29789 | 8.7 | 75.8 |
| pA29804 | 7.9 | 88.1 |
| pA29797 | 7.4 | 69.3 |
| pA29806 | 7 | 77.9 |
| pA29769 | 6.4 | 37.9 |
| pA29787 | 5.2 | 68.6 |
| pA29805 | 4.8 | 38.4 |
| pA29817 | 3.3 | 37.3 |
| pA29790 | 3.2 | 77.5 |
| pA29802 | 3.1 | 35.8 |
| pA29792 | 3 | 71.7 |
| pA29816 | 2.2 | 30.9 |
| pA29782 | 2.1 | 58.1 |
| pA29809 | 1.9 | 56.5 |
| pA29780 | 1.6 | 57.3 |
| pA29783 | 1.3 | 41.3 |
| pA29811 | 1 | 77.4 |
| pA29813 | 1 | 37.3 |
| pA29794 | 0.7 | 32.8 |
| pA29785 | 0.6 | 19.6 |
| pA29814 | 0.4 | 21.4 |
| pA29791 | 0.4 | 17.5 |
| pA29788 | 0.4 | 7.7 |
| pA29812 | 0.1 | 44.6 |
| pA29776 | 0.1 | 37.8 |

[0093] Computational designs were also conducted to improve the stability and expression of the B12GT using coevolutionary information. Eighty-five computational designs were chosen for experimental validation (SEQ ID NOs: 587-671). Expression plasmids for the computational designs were built as in Example 1. Each B12GT variant was expressed and purified as in Example 2. Each B12GT variant was assayed in a one-pot reaction with a SuSy variant of pA21838. The purified B12GT and SuSy were reacted with 100 mg/mL RA50, 250 mM Sucrose, and 0.5 mM ADP in 50 mM pH 6 phosphate buffer, 3 mM MgCl₂ and 50 mM NaCl for 24 hours at 60° C. Product rebaudiosides were monitored by LCMS similar to Example 3. Several designed enzymes expressed well and were active for Reb A to Reb D conversion (Table 11).

TABLE 11
Top B12GT Computational Designs

| | | Purified |
|---|---|---|
| ID | % Conversion | Conc (uM) |
| pA29620 | 92.6 | 93.7 |
| pA29619 | 91.8 | 29.7 |
| pA29665 | 90.5 | 142.7 |
| pA29621 | 88.7 | 62 |
| pA29661 | 87 | 29.4 |
| pA29618 | 82.5 | 77.7 |
| pA29660 | 56 | 7.6 |
| pA29615 | 54.4 | 191.9 |
| pA29616 | 53.8 | 123 |
| pA29646 | 40.4 | 60.8 |
| pA29617 | 34.7 | 150.1 |
| pA29642 | 32.3 | 71.3 |
| pA29636 | 24.9 | 28.1 |
| pA29662 | 22.7 | 12.4 |
| pA29639 | 21.9 | 49.3 |
| pA29669 | 21.4 | 60.3 |
| pA29625 | 21.2 | 11.4 |
| pA29632 | 20.9 | 94.1 |
| pA29676 | 18.7 | 74.5 |
| pA29664 | 18.5 | 19.7 |
| pA29640 | 16.7 | 37.6 |
| pA29683 | 13.2 | 19.9 |
| pA29672 | 12.9 | 19 |
| pA29624 | 12.7 | 66.8 |
| pA29638 | 12.2 | 29.4 |
| pA29671 | 11.8 | 12.6 |
| pA29675 | 10.9 | 23 |
| pA29650 | 9.9 | 18.9 |
| pA29677 | 9.2 | 48.8 |
| pA29657 | 8.5 | 11.8 |
| pA29668 | 8.5 | 74.8 |
| pA29666 | 8.1 | 108 |
| pA29630 | 7.7 | 20.7 |
| pA29652 | 7.1 | 11.2 |
| pA29623 | 7 | 25.3 |
| pA29667 | 6.7 | 67.9 |
| pA29684 | 6.5 | 105.2 |
| pA29678 | 6.4 | 15 |
| pA29654 | 6.1 | 22.2 |
| pA29685 | 5.8 | 91.7 |
| pA29634 | 5.2 | 47.7 |
| pA29627 | 4.9 | 26.6 |
| pA29682 | 4.9 | 82.9 |
| pA29622 | 4.8 | 68.4 |
| pA29659 | 3.9 | 31.1 |
| pA29635 | 3.9 | 29.1 |
| pA29648 | 3.5 | 10.1 |
| pA29633 | 3.4 | 9.7 |
| pA29673 | 3.3 | 50.6 |
| pA29626 | 3.2 | 26.5 |
| pA29680 | 3 | 18.6 |
| pA29679 | 1.9 | 15.2 |
| pA29681 | 1.9 | 106.5 |
| pA29631 | 1.6 | 34.9 |
| pA29637 | 1.6 | 77.7 |
| pA29687 | 0.9 | 44 |
| pA29695 | 0.7 | 56.4 |
| pA29690 | 0.7 | 36.3 |
| pA29686 | 0.4 | 24.8 |
| pA29689 | 0.4 | 52.7 |
| pA29628 | 0.4 | 5.2 |
| pA29688 | 0.4 | 11 |
| pA29629 | 0.3 | 102.1 |
| pA29696 | 0.2 | 31 |
| pA29703 | 0.2 | 29 |
| pA29698 | 0.1 | 43.9 |

[0094] Computational designs were also conducted to improve the stability and expression of the B12GT by redesigning and repacking buried protein cores. Thirty-five computational designs were chosen for experimental validation (SEQ ID NOs: 672-706). Expression plasmids for the computational designs were built as in Example 1. Each B12GT variant was expressed and purified as in Example 2. Each B12GT variant was assayed in a one-pot reaction with a SuSy variant of pA21838. The purified B12GT and SuSy were reacted with 100 mg/mL RA50, 250 mM Sucrose, and 0.5 mM ADP in 50 mM pH 6 phosphate buffer, 3 mM MgCl₂ and 50 mM NaCl for 24 hours at 60° C. Product rebaudiosides were monitored by LCMS similar to Example 3. Several designed enzymes expressed well and were active for Reb A to Reb D conversion (Table 12).

TABLE 12
Top B12GT Computational Designs

| | | Purified |
|---|---|---|
| ID | % Conversion | Conc (uM) |
| pA30048 | 86.4 | 96.8 |
| pA30047 | 50.9 | 106.7 |
| pA30027 | 48.7 | 168 |
| pA30050 | 35.9 | 185.3 |
| pA30037 | 26.7 | 95.9 |
| pA30019 | 24.4 | 93.4 |
| pA30034 | 23.5 | 69.8 |
| pA30028 | 14.1 | 229.9 |
| pA30031 | 13.8 | 9.6 |
| pA30036 | 13.3 | 107.1 |
| pA30017 | 12.9 | 68.2 |
| pA30040 | 8.5 | 48.2 |
| pA30049 | 8.3 | 209.7 |
| pA30032 | 8.3 | 7.6 |
| pA30039 | 7.3 | 92.1 |
| pA30042 | 4.8 | 60.4 |
| pA30029 | 4.5 | 141 |
| pA30035 | 3.6 | 21.6 |
| pA30026 | 3 | 158.6 |
| pA30030 | 2.8 | 280.3 |
| pA30041 | 2.2 | 69.1 |
| pA30025 | 1.9 | 74.8 |
| pA30045 | 1.9 | 70 |
| pA30046 | 1.4 | 103.1 |
| pA30018 | 1.2 | 38.5 |
| pA30038 | 1.1 | 94.4 |
| pA30015 | 0.8 | 13.3 |
| pA30020 | 0.7 | 69.8 |
| pA30023 | 0.7 | 128.2 |
| pA30016 | 0.3 | 16.3 |
| pA30033 | 0.2 | 16.8 |

[0095] Computational designs were also conducted to improve the B12GT by combining mutations known to be beneficial in homologous B12GTs. Fifty-nine computational designs were chosen for experimental validation (SEQ ID NOs: 707-765). Expression plasmids for the computational designs were built as in Example 1. Each B12GT variant was expressed and purified as in Example 2. Each B12GT variant was assayed in a one-pot reaction with a SuSy variant of pA21838. The purified B12GT and SuSy were reacted with 100 mg/mL RA50, 250 mM Sucrose, and 0.5 mM ADP in 50 mM pH 6 phosphate buffer and 50 mM NaCl for 24 hours at 60° C. Product rebaudiosides were monitored by LCMS similar to Example 3. Several designed enzymes expressed well and were active for Reb A to Reb D conversion (

[0096] Table 13). To distinguish between the top designs, they were re-assayed at lower protein concentrations (Table 14).

TABLE 13
Top B12GT Computational Designs

| | | Purified |
|---|---|---|
| ID | % Conversion | Conc (uM) |
| pA32962 | 92.3 | 95.6 |
| pA32940 | 91.9 | 122.6 |
| pA32945 | 91.3 | 74.5 |
| pA32947 | 91.2 | 80 |
| pA32952 | 90.9 | 83.3 |
| pA32941 | 90.8 | 114.3 |
| pA32946 | 90.7 | 75.8 |
| pA32943 | 90.3 | 113.7 |
| pA32942 | 89.4 | 120.4 |
| pA32939 | 85.7 | 115.5 |
| pA32944 | 77.4 | 31.6 |
| pA32970 | 33.4 | 56.9 |
| pA32960 | 30.3 | 12.6 |
| pA32956 | 30.1 | 44.1 |
| pA32951 | 27.5 | 81.2 |
| pA32966 | 26.2 | 31.6 |
| pA32967 | 12.6 | 64.9 |
| pA32954 | 8 | 111 |
| pA32950 | 6.6 | 48.2 |
| pA32949 | 6.5 | 16.7 |
| pA32978 | 5.1 | 33.9 |
| pA32971 | 4.1 | 19.6 |
| pA32988 | 3.9 | 18.7 |
| pA33004 | 3.4 | 15.1 |
| pA32987 | 3.3 | 17.6 |
| pA32981 | 3.1 | 32.8 |
| pA32958 | 2.7 | 26.6 |
| pA32959 | 2.2 | 20.2 |
| pA32963 | 1.8 | 13.4 |
| pA32953 | 1.7 | 97 |
| pA32973 | 1.3 | 64 |
| pA32948 | 1.2 | 10.9 |
| pA32965 | 1.2 | 7.6 |
| pA32957 | 0.8 | 14.7 |
| pA32955 | 0.7 | 19.1 |
| pA32998 | 0.7 | 30 |
| pA33001 | 0.7 | 12.8 |
| pA32982 | 0.3 | 16 |
| pA32997 | 0.2 | 32.2 |
| pA33002 | 0.2 | 14.2 |

TABLE 14
Top B12GT Computational Designs

| | | Purified |
|---|---|---|
| ID | % Conversion | Conc (uM) |
| pA32947 | 82 | 89 |
| pA32941 | 81.4 | 154 |
| pA32940 | 78.3 | 120 |
| pA32946 | 77.8 | 85.5 |
| pA32962 | 60 | 96.1 |
| pA32945 | 59.4 | 65.7 |
| pA32943 | 55.3 | 102.9 |
| pA32939 | 42 | 150.1 |
| pA32942 | 40.5 | 96 |
| pA32952 | 39.6 | 120.2 |
| pA32944 | 28.5 | 31.4 |
| pA32960 | 17.3 | 9.4 |
| pA32966 | 15.5 | 52.8 |
| pA32951 | 13 | 104.5 |
| pA32970 | 11.3 | 44.3 |
| pA32956 | 10.1 | 33.5 |
| pA32967 | 6.4 | 56.9 |
| pA32949 | 5.8 | 9.5 |
| pA32950 | 4.6 | 45.5 |
| pA32954 | 3.3 | 115.2 |

### Example 13: Computational Design of ADP-Glucose Dependent B12GTs

[0097] Structural models of a second B12GT variant of pA28422 were generated and used as the starting point for computational designs. Computational designs were conducted to improve the B12GT by combining mutations known to be beneficial in homologous B12GTs. Sixty-four computational designs were chosen for experimental validation (SEQ ID NOs: 766-829). Expression plasmids for the computational designs were built as in Example 1. Each B12GT variant was expressed and purified as in Example 2. Each B12GT variant was assayed in a one-pot reaction with a SuSy variant of pA21838. The purified B12GT and SuSy were reacted with 100 mg/mL RA50, 250 mM Sucrose, and 0.5 mM ADP in 50 mM pH 6 phosphate buffer and 50 mM NaCl for 24 hours at 60° C. Product rebaudiosides were monitored by LCMS similar to Example 3. Several designed enzymes expressed well and were active for Reb A to Reb D conversion (Table 15). To distinguish between the top designs, they were re-assayed at lower protein concentrations (Table 16).

TABLE 15
Top B12GT Computational Designs

| | | Purified |
|---|---|---|
| ID | % Conversion | Conc (uM) |
| pA33014 | 91 | 55.4 |
| pA33009 | 90.8 | 39.3 |
| pA33008 | 90.1 | 74.5 |
| pA33016 | 89 | 64 |
| pA33020 | 57.3 | 72.7 |
| pA33007 | 52.7 | 31.9 |
| pA33012 | 44.3 | 51.6 |
| pA33019 | 40.2 | 143.3 |
| pA33011 | 24.9 | 93.2 |
| pA33043 | 20.5 | 59.7 |
| pA33018 | 16 | 79.5 |
| pA33005 | 14.3 | 26.9 |
| pA33056 | 13.3 | 14.4 |
| pA33015 | 9.4 | 29.2 |
| pA33030 | 5.2 | 48.4 |
| pA33006 | 4.9 | 37.5 |
| pA33038 | 4.3 | 40.1 |
| pA33010 | 3.1 | 49.7 |
| pA33029 | 1.9 | 95.4 |
| pA33065 | 1.8 | 32.1 |
| pA33017 | 1 | 64.8 |
| pA33025 | 0.8 | 29.3 |
| pA33057 | 0.8 | 25.5 |
| pA33031 | 0.4 | 19 |
| pA33077 | 0.4 | 38.2 |
| pA33069 | 0.3 | 25 |
| pA33070 | 0.2 | 32 |
| pA33078 | 0.1 | 37.5 |
| pA33035 | 0.1 | 18.8 |
| pA33068 | 0.1 | 46.5 |

TABLE 16
Top B12GT Computational Designs

| ID | % Conversion | Purified Conc (uM) |
|---|---|---|
| pA33008 | 88.7 | 37.4 |
| pA33009 | 85.4 | 28.3 |
| pA33016 | 71.5 | 25.4 |
| pA33007 | 49.5 | 10.2 |
| pA33014 | 41.7 | 54.1 |
| pA33020 | 28.3 | 77.3 |
| pA33005 | 27.9 | 16.2 |
| pA33012 | 21.7 | 55 |
| pA33019 | 19.9 | 120.2 |
| pA33056 | 16.9 | 3.7 |
| pA33011 | 15 | 58.3 |
| pA33043 | 14.7 | 19.3 |
| pA33018 | 10.4 | 52 |
| pA33015 | 6.2 | 11.5 |
| pA33006 | 3.9 | 15.1 |
| pA33030 | 3 | 33.8 |

### Example 14: Representing Successful B12GTs Designs with a PSSM

[0098] The successful B12GT designs from Example 12 and Example 13 were used to generate a PSSM (Table 17). The PSSM is a concise way to represent the successful designs and related sequences. Sequences that have a PSSM score greater than 266.7 are considered related to the active computational designs described in Example 12 and Example 13. To score a sequence with the PSSM, it must first be aligned with the representative sequence Seq ID No: 5. For example, the following successful designs, pA29646, pA32946, pA29642, pA29798, have the following PSSM scores: 287.2, 288.0, 279.2, 276.8, while the wild-type B12GT pA28422, has a PSSM score of only 257.4.

TABLE 17
Position Specific Scoring Matrix (PSSM) of Successful B12GT Designs

| Seq | Amino Acid | | | | | | | | | | | | | | | | | | | | |
|---|---|---|---|---|---|---|---|---|---|---|---|---|---|---|---|---|---|---|---|---|---|
| Pos | A | R | N | D | C | Q | E | G | H | I | L | K | M | F | P | S | T | W | Y | V | — |
| 1 | 0 | 1 | 0 | 1 | 0 | 0.6 | 0 | 0 | 0 | 0 | 0 | 0 | 0 | 0 | 1 | 1 | 1 | 0 | 0 | 0 | 0 |
| 2 | 0 | 0 | 1 | 0 | 0 | 0 | 0 | 0 | 0 | 0 | 1 | 0 | 0 | 0 | 0 | 1 | 0.6 | 0 | 0 | 0 | 0 |
| 3 | 0 | 0 | 0 | 0 | 0 | 1 | 0 | 0 | 0 | 0 | 0.6 | 0 | 0 | 1 | 0 | 0 | 0 | 0 | 0 | 0 | 0 |
| 4 | 0 | 0.6 | 0 | 0 | 0 | 1 | 0 | 0 | 0 | 0 | 0 | 0 | 0 | 0 | 0 | 0 | 1 | 0 | 0 | 0 | 0 |
| 5 | 0 | 0 | 0 | 0 | 0 | 0 | 0 | 0 | 0 | 0 | 0 | 0 | 0 | 0 | 0 | 0 | 0 | 0 | 0 | 0.6 | 0 |
| 6 | 1 | 0 | 0 | 0 | 0 | 0 | 0 | 0 | 0 | 0 | 0.6 | 0 | 0 | 0 | 0 | 0 | 0.6 | 0 | 0 | 1 | 0 |
| 7 | 0 | 0 | 0 | 0 | 0 | 0 | 0 | 0 | 0 | 0 | 0 | 0 | 0.6 | 0 | 0 | 0 | 0 | 0 | 0 | 0 | 0 |
| 8 | 0 | 0 | 0 | 0 | 0 | 0 | 0 | 0 | 0 | 0 | 1 | 0 | 0 | 0.6 | 0 | 0 | 0 | 0 | 0 | 1 | 0 |
| 9 | 0 | 0 | 0 | 0 | 0 | 0 | 0 | 0 | 0 | 0 | 0 | 0 | 0 | 0 | 0.6 | 0 | 0 | 0 | 0 | 0 | 0 |
| 10 | 0 | 0 | 0 | 0 | 0 | 0 | 0 | 0 | 0 | 0 | 0 | 0 | 0 | 0 | 0 | 0 | 0 | 0.6 | 0 | 0 | 0 |
| 11 | 0 | 0 | 0 | 0 | 0 | 0 | 0 | 0 | 0 | 0 | 0.6 | 0 | 0 | 0 | 0 | 0 | 0 | 0 | 0 | 0 | 0 |
| 12 | 0.6 | 0 | 0 | 0 | 0 | 0 | 0 | 0.6 | 0 | 0 | 0 | 0 | 0 | 0 | 0 | 0 | 0 | 0 | 0 | 0 | 0 |
| 13 | 0 | 0 | 0 | 0 | 0 | 0 | 0 | 0 | 0 | 0 | 0.6 | 0 | 0 | 0 | 0 | 0 | 0 | 0 | 0 | 0 | 0 |
| 14 | 0 | 0 | 0 | 0 | 0 | 0 | 0 | 0.6 | 0 | 0 | 0 | 0 | 0 | 0 | 0 | 0 | 0 | 0 | 0 | 0 | 0 |
| 15 | 0 | 0 | 0 | 0 | 0 | 0 | 0 | 0 | 0.6 | 0 | 0 | 0 | 0 | 0 | 0 | 0 | 0 | 0 | 0 | 0 | 0 |
| 16 | 0 | 0 | 0 | 0 | 0 | 0 | 0 | 0 | 0 | 1 | 0 | 0 | 0 | 0 | 0 | 0 | 0 | 0 | 0 | 0.6 | 0 |
| 17 | 0 | 0 | 0.6 | 0 | 0 | 0 | 0 | 0 | 0 | 0 | 0 | 0 | 0 | 0 | 0 | 0 | 0 | 0 | 0 | 0 | 0 |
| 18 | 0 | 0 | 0 | 0 | 0 | 0 | 0 | 0 | 0 | 0 | 0 | 0 | 0 | 0 | 0.6 | 0 | 0 | 0 | 0 | 0 | 0 |
| 19 | 0 | 0 | 0 | 0 | 0 | 0 | 0 | 0 | 0 | 0 | 0 | 0 | 0 | 0.6 | 0 | 0 | 0 | 0 | 1 | 0 | 0 |
| 20 | 0 | 0 | 0 | 0 | 0 | 0 | 0 | 0 | 0 | 0 | 0.6 | 0 | 0 | 0 | 0 | 0 | 0 | 0 | 0 | 0 | 0 |
| 21 | 0 | 0.6 | 0 | 0 | 0 | 0 | 0 | 0 | 0 | 0 | 0 | 0 | 0 | 0 | 0 | 0 | 0 | 0 | 0 | 0 | 0 |
| 22 | 0 | 0 | 0 | 0 | 0 | 0 | 0 | 0 | 0 | 0.6 | 1 | 0 | 0 | 0 | 0 | 0 | 0 | 0 | 0 | 1 | 0 |
| 23 | 0.6 | 0 | 0 | 0 | 0 | 0 | 0 | 0 | 0 | 0 | 0 | 0 | 0 | 0 | 0 | 0 | 0 | 0 | 0 | 0 | 0 |
| 24 | 0 | 1 | 0 | 0 | 0 | 0 | 0 | 0 | 0 | 0 | 0 | 0.6 | 0 | 0 | 0 | 0 | 0 | 0 | 0 | 0 | 0 |
| 25 | 0 | 0 | 0 | 0 | 0 | 0.6 | 0 | 0 | 0 | 0 | 0 | 1 | 0 | 0 | 0 | 0 | 0 | 0 | 0 | 0 | 0 |
| 26 | 0 | 0 | 0 | 0 | 0 | 0 | 0 | 0 | 0 | 0 | 0.6 | 0 | 1 | 0 | 0 | 0 | 0 | 0 | 0 | 0 | 0 |
| 27 | 0.6 | 0 | 0 | 0 | 0 | 0 | 0 | 0 | 0 | 0 | 0 | 0 | 0 | 0 | 0 | 0 | 0 | 0 | 0 | 0 | 0 |
| 28 | 0 | 0 | 0 | 0.6 | 0 | 0 | 0 | 0 | 0 | 0 | 0 | 1 | 0 | 0 | 0 | 0 | 0 | 0 | 0 | 0 | 0 |
| 29 | 0 | 0.6 | 0 | 0 | 0 | 0 | 0 | 0 | 0 | 0 | 0 | 0 | 0 | 0 | 0 | 0 | 0 | 0 | 0 | 0 | 0 |
| 30 | 0 | 0 | 1 | 0 | 0 | 0 | 0 | 0.6 | 0 | 0 | 0 | 0 | 0 | 0 | 0 | 0 | 0 | 0 | 0 | 0 | 0 |
| 31 | 0 | 0 | 0 | 0 | 0 | 0 | 0 | 0 | 0 | 0 | 0 | 0 | 1 | 0.6 | 0 | 0 | 0 | 0 | 0 | 0 | 0 |
| 32 | 0 | 0 | 0 | 0 | 0 | 0 | 0 | 0 | 1 | 1 | 1 | 0 | 0 | 0 | 0 | 1 | 0 | 0 | 1 | 0.6 | 0 |
| 33 | 0 | 0 | 0 | 0 | 0 | 0 | 0 | 0 | 0 | 0.6 | 0 | 0 | 0 | 0 | 0 | 0 | 0 | 0 | 0 | 1 | 0 |
| 34 | 0 | 0 | 0 | 0 | 0 | 0 | 0 | 0 | 1 | 0 | 0 | 0 | 0 | 0 | 0 | 0 | 0 | 0 | 0.6 | 0 | 0 |
| 35 | 0 | 0 | 0 | 0 | 0 | 0 | 0 | 0 | 0 | 0 | 0.6 | 0 | 1 | 0 | 0 | 0 | 0 | 0 | 0 | 1 | 0 |
| 36 | 1 | 0 | 0 | 0 | 1 | 0 | 0 | 0 | 0 | 0 | 1 | 0 | 0 | 0 | 0 | 0 | 0 | 0 | 0 | 0.6 | 0 |
| 37 | 0 | 0 | 1 | 0 | 0 | 0 | 0 | 0 | 0 | 0 | 0 | 0 | 0 | 0 | 0 | 0.6 | 0 | 0 | 0 | 0 | 0 |
| 38 | 0 | 0 | 0 | 0 | 0 | 0 | 0 | 0 | 0 | 0 | 0 | 0 | 0 | 0 | 0 | 0 | 0.6 | 0 | 0 | 0 | 0 |
| 39 | 0.6 | 0 | 0 | 0 | 0 | 0 | 0 | 0 | 0 | 0 | 0 | 1 | 1 | 0 | 1 | 0 | 0 | 0 | 0 | 0 | 0 |
| 40 | 0 | 0 | 0 | 0 | 0 | 0 | 0 | 0 | 0 | 0.6 | 0 | 0 | 0 | 0 | 0 | 0 | 0 | 0 | 0 | 1 | 0 |
| 41 | 0 | 0 | 0.6 | 0 | 0 | 1 | 0 | 0 | 0 | 0 | 0 | 0 | 0 | 0 | 0 | 0 | 0 | 0 | 0 | 1 | 0 |
| 42 | 0 | 0 | 0 | 0 | 0 | 0 | 0 | 0 | 0 | 0 | 0.6 | 0 | 0 | 0 | 0 | 0 | 0 | 0 | 0 | 0 | 0 |
| 43 | 0 | 0 | 1 | 0 | 0 | 0 | 0.6 | 0 | 0 | 0 | 0 | 1 | 0 | 0 | 0 | 1 | 0 | 0 | 0 | 0 | 0 |
| 44 | 0 | 0 | 0 | 0 | 0 | 0 | 0 | 0 | 0 | 0 | 1 | 0 | 0.6 | 0 | 0 | 0.6 | 0 | 0 | 0 | 0 | 0 |
| 45 | 1 | 0 | 0 | 0 | 0 | 0 | 0 | 0 | 0 | 0.6 | 1 | 0 | 0 | 0 | 0 | 0 | 1 | 0 | 0 | 0 | 0 |
| 46 | 0 | 1 | 0 | 0 | 0 | 0 | 0 | 0 | 0 | 0 | 0 | 0.6 | 0 | 0 | 0 | 0 | 0 | 0 | 0 | 0 | 0 |
| 47 | 0 | 0 | 0 | 0 | 0 | 0 | 0 | 1 | 1 | 0 | 0 | 0.6 | 0 | 0 | 0 | 0 | 0 | 0 | 0 | 0 | 0 |
| 48 | 0 | 0.6 | 0 | 0 | 0 | 0 | 0 | 0 | 0 | 0 | 0 | 0 | 0 | 0 | 0 | 0 | 0 | 0 | 0 | 0 | 0 |
| 49 | 0 | 0 | 0 | 0 | 0 | 0 | 0 | 0 | 0 | 0.6 | 0 | 0 | 0 | 0 | 0 | 0 | 0 | 0 | 0 | 0 | 0 |
| 50 | 0 | 0 | 0 | 0 | 0 | 0 | 0 | 0 | 0 | 0 | 0 | 0 | 0 | 0 | 0.6 | 0 | 1 | 0 | 0 | 0 | 0 |
| 51 | 0 | 0 | 1 | 0 | 0 | 0 | 0.6 | 0 | 0 | 0 | 0 | 1 | 0 | 0 | 0 | 0 | 0 | 0 | 1 | 0 | 0 |
| 52 | 1 | 0 | 0 | 0 | 0 | 0 | 0 | 0 | 0 | 0 | 0 | 0.6 | 0 | 0 | 0 | 0 | 0 | 0 | 0 | 0 | 0 |
| 53 | 0 | 0 | 0 | 0 | 0 | 0 | 0 | 0 | 0 | 0 | 0 | 0 | 0 | 0 | 0 | 0 | 0 | 0 | 0.6 | 0 | 0 |
| 54 | 1 | 0 | 0 | 0 | 0 | 1 | 0 | 0 | 0 | 0 | 1 | 0 | 0 | 0 | 0 | 0.6 | 0 | 0 | 0 | 1 | 0 |
| 55 | 0 | 0 | 0.6 | 1 | 0 | 1 | 1 | 0 | 0 | 0 | 1 | 0 | 0 | 0 | 0 | 1 | 0 | 0 | 0 | 0 | 0 |
| 56 | 0 | 0 | 0 | 0 | 0 | 0 | 0 | 0 | 0 | 0 | 1 | 0 | 0 | 0 | 0 | 0.6 | 0 | 0 | 0 | 0 | 0 |
| 57 | 0 | 0 | 0 | 0 | 0 | 0 | 0 | 0 | 0 | 0.6 | 0 | 0 | 0 | 0 | 0 | 0 | 0 | 0 | 0 | 0 | 0 |
| 58 | 0 | 0 | 0 | 0 | 0 | 1 | 1 | 0 | 0.6 | 1 | 0 | 0 | 0 | 0 | 0 | 0 | 0 | 0 | 0 | 0 | 0 |
| 59 | 0 | 0 | 0 | 0 | 0 | 0 | 0 | 0 | 0 | 0 | 0.6 | 0 | 0 | 0 | 0 | 0 | 0 | 0 | 0 | 0 | 0 |
| 60 | 0 | 0 | 0 | 0 | 0 | 0 | 0 | 0 | 0 | 1 | 0 | 0 | 0 | 0 | 0 | 0 | 0 | 0 | 0 | 0.6 | 0 |
| 61 | 0 | 0 | 0 | 0 | 0 | 0 | 0.6 | 0 | 0 | 0 | 0 | 0 | 0 | 0 | 0 | 0 | 1 | 0 | 0 | 0 | 0 |
| 62 | 0 | 0 | 0 | 0 | 0 | 0 | 0 | 0 | 0 | 0 | 0.6 | 0 | 0 | 0 | 0 | 1 | 0 | 0 | 1 | 1 | 0 |
| 63 | 0.6 | 0.6 | 0 | 0 | 0 | 1 | 0 | 0 | 1 | 0 | 0 | 0 | 0 | 0 | 0 | 1 | 0 | 0 | 0 | 0 | 0 |
| 64 | 0 | 0 | 0 | 0 | 0 | 0 | 0 | 0 | 0 | 0 | 0.6 | 0 | 0 | 0 | 0 | 0 | 0 | 0 | 0 | 0 | 0 |
| 65 | 0 | 0 | 0 | 0 | 0 | 0 | 0 | 0 | 0 | 0 | 0 | 0 | 0 | 0 | 0.6 | 0 | 0 | 0 | 0 | 0 | 0 |
| 66 | 0 | 0 | 0 | 0 | 0 | 1 | 0.6 | 0 | 0 | 0 | 1 | 0 | 0 | 0 | 0 | 0 | 0 | 0 | 0 | 0 | 0 |
| 67 | 0 | 0 | 0 | 0 | 0 | 0 | 0 | 0 | 0 | 0 | 0.6 | 0 | 0 | 0 | 0 | 0 | 0 | 0 | 0 | 0 | 0 |
| 68 | 0 | 0 | 0 | 0 | 0 | 0 | 0 | 0 | 0 | 0 | 0 | 0 | 0 | 0 | 0.6 | 0 | 0 | 0 | 0 | 0 | 0 |
| 69 | 0 | 0 | 0 | 0 | 0 | 0 | 0.6 | 0 | 0 | 0 | 0 | 0 | 0 | 0 | 0 | 0 | 0 | 0 | 0 | 0 | 0 |
| 70 | 0 | 0 | 0 | 0 | 0 | 0 | 0 | 0 | 0 | 0 | 0.6 | 0 | 0 | 0 | 0 | 0 | 0 | 0 | 0 | 0 | 0 |
| 71 | 0 | 0 | 0 | 0 | 0 | 0 | 0 | 0 | 0 | 0 | 0 | 0 | 0 | 0 | 0.6 | 0 | 0 | 0 | 0 | 0 | 0 |
| 72 | 0 | 0 | 0 | 0 | 0 | 0 | 0 | 0 | 0 | 0 | 0 | 0 | 0 | 0 | 0.6 | 1 | 0 | 0 | 0 | 0 | 0 |
| 73 | 0 | 0 | 0 | 0 | 0 | 0 | 0 | 0 | 0.6 | 0 | 0 | 0 | 0 | 0 | 0 | 0 | 0 | 0 | 1 | 0 | 0 |
| 74 | 0 | 0 | 0 | 0 | 0 | 0 | 0 | 0 | 0 | 0 | 1 | 0 | 0 | 0 | 0 | 0 | 0 | 0 | 0.6 | 0 | 0 |
| 75 | 0 | 0 | 0 | 0 | 0 | 0 | 0 | 0 | 0.6 | 0 | 0 | 0 | 0 | 0 | 0 | 0 | 0 | 1 | 0 | 0 | 0 |
| 76 | 0 | 0 | 0 | 0 | 0 | 0 | 0 | 0 | 0 | 0 | 0 | 0 | 0 | 0 | 0 | 0 | 0.6 | 0 | 0 | 0 | 0 |
| 77 | 0 | 0 | 0 | 0 | 0 | 0 | 0 | 0 | 0 | 0 | 0 | 0 | 0 | 0 | 0 | 0 | 0.6 | 0 | 0 | 0 | 0 |
| 78 | 0 | 0 | 0.6 | 0 | 0 | 0 | 0 | 0 | 0 | 0 | 0 | 0 | 0 | 0 | 0 | 0 | 0 | 0 | 0 | 0 | 0 |
| 79 | 1 | 0 | 0 | 0 | 0 | 0 | 0 | 0.6 | 0 | 0 | 0 | 0 | 0 | 0 | 0 | 0 | 0 | 0 | 0 | 0 | 0 |
| 80 | 0 | 0 | 0 | 0 | 0 | 0 | 0 | 0 | 0 | 0 | 0.6 | 0 | 0 | 0 | 0 | 0 | 0 | 0 | 0 | 0 | 0 |
| 81 | 0 | 0 | 0 | 0 | 0 | 0 | 0 | 0 | 0 | 0 | 0 | 0 | 0 | 0 | 0.6 | 0 | 0 | 0 | 0 | 0 | 0 |
| 82 | 0 | 0 | 0 | 0 | 0 | 0 | 0 | 0 | 0 | 0 | 0 | 0 | 0 | 0 | 0.6 | 0 | 0 | 0 | 0 | 0 | 0 |
| 83 | 0 | 0 | 0 | 0 | 0 | 0 | 0 | 0 | 0.6 | 0 | 0 | 0 | 0 | 0 | 0 | 0 | 0 | 0 | 0 | 0 | 0 |
| 84 | 0 | 0 | 0 | 0 | 0 | 0 | 0 | 0 | 0 | 0 | 0.6 | 0 | 0 | 0 | 0 | 0 | 0 | 0 | 0 | 0 | 0 |
| 85 | 0 | 0 | 0.6 | 0 | 0 | 0 | 0 | 0 | 0 | 0 | 0 | 0 | 0 | 0 | 0 | 0 | 0 | 0 | 0 | 0 | 0 |
| 86 | 0 | 0 | 0 | 0 | 0 | 0 | 0 | 0.6 | 0 | 0 | 0 | 0.6 | 0 | 0 | 0 | 0 | 0 | 0 | 0 | 0 | 0 |
| 87 | 0 | 1 | 0 | 0 | 0 | 0 | 0 | 0 | 0 | 1 | 1 | 0 | 0 | 0 | 0 | 0 | 0.6 | 0 | 0 | 1 | 0 |
| 88 | 0 | 0 | 0 | 0 | 0 | 0 | 0 | 0 | 0 | 0 | 0.6 | 0 | 0 | 0 | 0 | 0 | 0 | 0 | 0 | 0 | 0 |
| 89 | 0 | 1 | 0 | 0 | 0 | 1 | 0 | 0 | 0.6 | 1 | 0 | 1 | 0 | 0 | 0 | 0 | 0 | 0 | 0 | 0 | 0 |
| 90 | 0 | 1 | 0 | 0 | 0 | 1 | 0 | 0 | 0 | 0 | 0 | 0.6 | 0 | 0 | 0 | 0 | 0 | 0 | 0 | 0 | 0 |
| 91 | 0.6 | 0 | 0 | 0 | 0 | 0 | 0 | 0 | 0 | 0 | 1 | 0 | 0 | 0 | 0 | 0 | 0 | 0 | 0 | 0 | 0 |
| 92 | 0 | 0 | 0 | 0 | 0 | 0 | 0 | 0 | 0 | 0 | 0.6 | 0 | 0 | 0 | 0 | 0 | 0 | 0 | 0 | 1 | 0 |
| 93 | 0 | 1 | 0 | 0 | 0 | 1 | 0 | 0 | 0 | 0 | 0 | 0.6 | 0 | 0 | 0 | 0 | 0 | 0 | 0 | 0 | 0 |
| 94 | 0 | 0 | 0 | 0 | 0 | 0 | 0 | 0 | 0 | 0 | 1 | 0 | 0.6 | 0 | 0 | 0 | 0 | 0 | 0 | 0 | 0 |
| 95 | 1 | 0 | 0 | 0 | 0 | 0 | 0 | 0 | 0 | 0 | 0 | 0 | 0 | 0 | 0 | 0.6 | 0 | 0 | 0 | 0 | 0 |
| 96 | 0.6 | 1 | 0 | 0 | 0 | 1 | 0 | 0 | 0 | 0 | 0 | 0 | 0 | 0 | 0 | 0 | 0 | 0 | 0 | 0 | 0 |
| 97 | 0 | 0 | 0 | 0 | 0 | 0 | 0 | 0 | 0 | 0 | 0 | 0 | 0 | 0 | 0.6 | 0 | 0 | 0 | 0 | 0 | 0 |
| 98 | 0 | 0 | 0.6 | 0 | 0 | 0 | 1 | 0 | 0 | 0 | 0 | 0 | 0 | 0 | 0 | 0 | 1 | 0 | 0 | 0 | 0 |
| 99 | 0 | 0 | 0 | 0 | 0 | 0 | 0 | 0 | 0 | 1 | 1 | 0 | 0 | 0.6 | 0 | 0 | 0 | 0 | 0 | 1 | 0 |
| 100 | 0 | 0 | 0 | 0 | 0 | 0 | 0 | 0 | 0 | 0 | 0 | 0 | 0 | 0 | 0 | 0.6 | 0 | 0 | 0 | 0 | 0 |
| 101 | 0 | 0 | 0 | 0 | 0 | 0 | 0 | 0 | 0 | 0 | 0 | 0.6 | 0 | 0 | 0 | 0 | 0 | 0 | 0 | 0 | 0 |
| 102 | 0 | 0 | 0 | 0 | 0 | 1 | 0 | 0 | 0 | 0.6 | 1 | 0 | 0 | 0 | 0 | 0 | 1 | 0 | 0 | 1 | 0 |
| 103 | 0 | 0 | 0 | 0 | 0 | 0 | 0 | 0 | 0 | 1 | 0.6 | 0 | 0 | 0 | 0 | 0 | 0 | 0 | 0 | 1 | 0 |
| 104 | 0 | 1 | 0 | 0 | 0 | 0.6 | 1 | 0 | 0 | 0 | 0 | 1 | 0 | 0 | 0 | 1 | 0 | 0 | 0 | 0 | 0 |
| 105 | 1 | 0 | 0.6 | 1 | 0 | 0 | 0 | 0 | 0 | 0 | 0 | 0 | 0 | 0 | 0 | 0 | 1 | 0 | 0 | 0 | 0 |
| 106 | 0 | 0 | 0 | 0 | 0 | 0 | 0 | 0 | 0 | 0.6 | 0.6 | 0 | 0 | 0 | 0 | 0 | 0 | 1 | 0 | 0 | 0 |
| 107 | 0 | 0 | 1 | 0 | 0 | 0 | 0 | 0 | 0 | 0 | 0 | 0.6 | 0 | 0 | 0 | 0 | 0 | 0 | 0 | 0 | 0 |
| 108 | 1 | 0 | 0 | 0 | 0 | 0 | 0 | 0 | 0 | 0 | 0 | 0 | 0 | 0 | 0.6 | 1 | 0 | 0 | 0 | 1 | 0 |
| 109 | 1 | 0 | 0 | 0.6 | 0 | 0 | 0 | 0 | 0 | 0 | 0 | 0 | 0 | 0 | 0 | 1 | 1 | 0 | 0 | 0 | 0 |
| 110 | 0 | 0 | 0 | 0 | 0 | 0 | 0 | 0 | 0 | 0 | 0.6 | 0 | 0 | 0 | 0 | 0 | 0 | 0 | 0 | 0 | 0 |
| 111 | 0 | 0 | 0 | 0 | 0 | 0 | 0 | 0 | 0 | 1 | 1 | 0 | 0 | 0 | 0 | 0 | 0 | 0 | 0 | 0.6 | 0 |
| 112 | 0 | 0 | 0 | 0 | 0 | 0 | 0 | 0 | 0 | 1 | 0.6 | 0 | 0 | 0 | 0 | 0 | 0 | 0 | 0 | 1 | 0 |
| 113 | 0 | 0 | 0 | 0 | 0 | 0 | 0 | 0 | 0 | 0 | 1 | 0 | 0 | 1 | 0 | 0 | 0 | 0 | 0.6 | 1 | 0 |
| 114 | 0 | 0 | 0 | 0.6 | 0 | 0 | 0 | 0 | 0 | 0 | 0 | 0 | 0 | 0 | 0 | 0 | 0 | 0 | 0 | 0 | 0 |
| 115 | 0 | 0 | 0 | 0 | 0 | 0 | 0 | 0 | 0 | 1 | 1 | 0 | 1 | 0.6 | 0 | 0 | 0 | 0 | 0 | 0 | 0 |
| 116 | 0 | 0 | 0 | 0 | 0 | 0 | 0 | 0 | 0 | 0 | 0.6 | 0 | 0 | 0 | 0 | 0 | 0 | 0 | 0 | 0 | 0 |
| 117 | 1 | 0 | 0 | 0 | 0 | 0.6 | 0 | 0 | 0 | 1 | 1 | 0 | 0 | 0 | 0 | 0 | 0 | 0 | 0 | 0.6 | 0 |
| 118 | 0 | 0 | 0 | 0 | 0 | 1 | 0 | 0 | 0 | 0 | 0 | 0 | 0 | 0 | 0.6 | 0 | 0 | 0 | 0 | 0 | 0 |
| 119 | 0 | 0 | 0 | 0 | 0 | 0 | 0 | 0 | 0 | 0 | 0 | 0 | 0 | 0 | 0 | 0 | 0 | 0.6 | 0 | 0 | 0 |
| 120 | 0.6 | 0 | 0 | 0 | 0 | 0 | 0 | 0 | 0 | 0 | 1 | 0 | 0 | 0 | 0 | 0 | 0 | 0 | 0 | 0 | 0 |
| 121 | 0 | 0 | 0 | 0 | 0 | 0 | 0.6 | 0 | 0 | 0 | 0 | 0 | 0 | 0 | 0 | 1 | 0 | 0 | 0 | 0 | 0 |
| 122 | 0 | 0 | 0 | 0 | 0 | 0 | 0 | 0 | 0 | 0 | 0 | 0.6 | 0 | 0 | 0 | 0 | 0 | 0 | 0 | 0 | 0 |
| 123 | 0 | 0 | 0 | 0 | 0 | 0 | 0 | 0 | 0 | 1 | 1 | 0 | 0 | 0 | 0 | 1 | 0 | 0 | 0 | 0.6 | 0 |
| 124 | 0.6 | 0 | 0 | 0 | 0 | 0 | 0 | 0 | 0 | 0 | 0 | 0 | 0 | 0 | 0 | 0 | 0 | 0 | 0 | 0 | 0 |
| 125 | 0 | 0 | 1 | 0 | 0 | 0 | 0 | 0 | 0 | 0 | 0.6 | 1 | 0 | 0 | 0 | 0 | 0 | 0 | 0 | 0 | 0 |
| 126 | 0 | 0 | 0 | 1 | 0 | 0 | 0.6 | 0 | 0 | 0 | 0 | 0 | 0 | 0 | 0 | 1 | 0 | 0 | 0 | 0 | 0 |
| 127 | 0 | 1 | 0 | 0 | 0 | 0.6 | 0 | 0 | 0 | 0 | 1 | 0 | 0 | 0 | 0 | 0 | 0 | 0 | 0 | 0 | 0 |
| 128 | 0 | 0 | 1 | 0 | 0 | 0 | 0 | 0.6 | 0 | 0 | 0 | 0 | 0 | 0 | 0 | 0 | 0 | 0 | 0 | 0 | 0 |
| 129 | 0 | 0 | 0 | 0 | 0 | 0 | 0 | 0 | 0 | 0.6 | 0 | 0 | 0 | 0 | 0 | 0 | 0 | 0 | 0 | 1 | 0 |
| 130 | 0 | 0 | 0 | 0 | 0 | 0 | 0 | 0 | 0 | 0 | 0 | 0 | 0 | 0 | 0.6 | 0 | 0 | 0 | 0 | 0 | 0 |
| 131 | 0.6 | 0 | 0 | 0 | 0 | 0 | 0 | 1 | 0 | 0 | 0 | 0 | 0 | 0 | 0 | 1 | 0 | 0 | 0 | 1 | 0 |
| 132 | 0 | 0 | 0 | 0 | 0 | 0 | 0 | 0 | 0 | 1 | 0 | 0 | 0 | 0 | 0 | 0 | 0 | 0 | 0 | 0.6 | 0 |
| 133 | 0 | 1 | 0 | 0 | 0 | 0 | 0 | 0 | 0 | 0 | 0 | 1 | 0 | 0 | 0.6 | 0 | 0 | 0 | 0 | 0 | 0 |
| 134 | 0 | 0 | 0 | 0 | 0 | 0 | 0 | 0 | 0 | 0 | 0.6 | 0 | 0 | 1 | 0 | 0 | 0 | 0 | 0 | 0 | 0 |
| 135 | 1 | 0 | 0 | 0 | 0 | 0 | 0 | 0 | 0 | 1 | 0.6 | 0 | 0 | 0 | 0 | 0 | 0 | 1 | 0 | 0 | 0 |
| 136 | 0 | 0 | 0 | 0 | 0 | 0 | 0 | 0 | 0 | 0 | 0 | 0 | 0 | 0 | 0 | 0 | 0.6 | 0 | 0 | 0 | 0 |
| 137 | 0 | 0 | 0 | 0 | 0 | 0 | 0 | 0 | 0 | 0 | 0 | 0 | 0 | 1 | 0 | 0.6 | 0 | 0 | 0 | 0 | 0 |
| 138 | 0 | 0 | 0 | 0 | 0 | 0 | 0 | 0.6 | 0 | 0 | 0 | 0 | 0 | 0 | 0 | 0 | 0 | 0 | 0 | 0 | 0 |
| 139 | 0.6 | 0 | 0 | 0 | 0 | 0 | 0 | 0 | 0 | 0 | 1 | 0 | 0 | 0 | 0 | 0 | 0 | 0 | 0 | 1 | 0 |
| 140 | 0.6 | 0 | 0 | 0 | 0 | 0 | 0 | 0 | 0 | 0 | 0 | 0 | 0 | 0 | 0 | 0 | 0 | 0 | 0 | 0 | 0 |
| 141 | 0 | 0 | 0 | 0 | 0 | 0 | 0 | 0 | 0 | 0 | 0.6 | 0 | 0 | 0 | 0 | 0 | 0 | 0 | 0 | 0 | 0 |
| 142 | 0 | 0 | 0 | 0 | 0 | 0 | 0 | 0 | 0 | 0 | 1 | 0 | 0 | 0.6 | 0 | 0 | 0 | 1 | 0 | 0 | 0 |
| 143 | 1 | 0 | 0 | 0 | 0 | 0 | 0 | 0 | 0 | 0 | 0 | 0 | 0 | 0 | 0 | 0.6 | 0 | 0 | 0 | 0 | 0 |
| 144 | 0 | 0 | 0 | 0 | 0 | 0 | 0 | 0 | 0 | 0 | 0 | 0 | 0 | 0 | 0 | 0 | 0 | 0 | 0.6 | 0 | 0 |
| 145 | 0 | 0 | 0 | 0 | 0 | 0 | 0 | 0 | 0 | 1 | 1 | 0 | 0 | 0.6 | 0 | 0 | 0 | 0 | 0 | 0 | 0 |
| 146 | 0 | 0 | 0 | 0 | 0 | 0 | 0 | 0 | 0 | 0 | 1 | 0 | 1 | 0.6 | 0 | 0 | 0 | 1 | 0 | 1 | 0 |
| 147 | 0 | 0 | 0.6 | 0 | 0 | 1 | 1 | 0 | 1 | 0 | 0 | 0 | 0 | 0 | 0 | 0 | 0 | 0 | 0 | 0 | 0 |
| 148 | 0 | 0 | 0 | 0 | 0 | 0 | 0 | 0 | 1 | 0 | 0 | 0 | 0 | 0.6 | 0 | 0 | 0 | 0 | 0 | 0 | 0 |
| 149 | 0 | 0 | 0 | 0 | 0 | 0 | 0 | 0 | 0 | 0 | 0.6 | 0 | 0 | 0 | 0 | 0 | 0 | 0 | 0 | 1 | 0 |
| 150 | 0 | 1 | 0 | 1 | 0 | 0 | 0 | 0 | 0 | 0 | 0 | 0.6 | 0 | 0 | 0 | 0 | 1 | 0 | 0 | 0 | 0 |
| 151 | 0 | 0.6 | 1 | 0 | 0 | 0 | 0 | 0 | 0 | 0 | 0 | 1 | 0 | 0 | 0 | 0 | 0 | 0 | 0 | 0 | 0 |
| 152 | 0 | 0 | 0 | 0 | 0 | 0 | 0 | 0 | 0 | 0 | 1 | 0 | 0 | 0 | 0.6 | 0 | 0 | 0 | 0 | 0 | 0 |
| 153 | 0 | 0 | 0 | 0 | 0 | 0 | 0 | 0.6 | 0 | 0 | 0 | 0 | 0 | 0 | 0 | 0 | 0 | 0 | 0 | 0 | 0 |
| 154 | 0 | 0 | 1 | 0 | 0 | 0 | 0.6 | 0 | 0.6 | 0 | 0 | 0 | 0 | 0 | 0 | 0 | 0 | 0 | 0 | 1 | 0 |
| 155 | 0 | 0 | 0 | 0 | 0 | 0 | 0.6 | 0 | 0 | 0 | 0 | 0 | 0 | 0 | 1 | 0 | 0 | 0 | 0 | 0 | 0 |
| 156 | 0 | 0 | 0 | 0 | 0 | 0 | 0 | 0 | 0 | 0 | 0 | 0 | 0 | 0.6 | 0 | 0 | 0 | 0 | 0 | 0 | 0 |
| 157 | 0 | 0 | 0 | 0 | 0 | 0 | 0 | 0 | 0 | 0 | 1 | 0 | 0 | 0 | 0.6 | 0 | 0 | 0 | 0 | 0 | 0 |
| 158 | 0 | 0 | 0 | 0 | 0 | 0 | 0 | 0 | 0 | 0 | 0 | 0 | 0 | 0.6 | 0 | 0 | 0 | 0 | 0 | 0 | 0 |
| 159 | 0 | 0 | 0 | 0 | 0 | 0 | 0.6 | 0 | 0 | 0 | 0 | 0 | 0 | 0 | 0.6 | 0 | 0 | 0 | 0 | 0 | 0 |
| 160 | 0.6 | 0 | 0 | 0 | 0 | 0 | 1 | 0 | 0 | 0 | 0 | 0 | 0 | 0 | 0 | 0 | 0 | 0 | 0 | 0 | 0 |
| 161 | 0 | 0 | 0 | 0 | 0 | 0 | 0 | 0 | 0 | 0.6 | 0 | 0 | 0 | 0 | 0 | 0 | 0 | 0 | 0 | 0 | 0 |
| 162 | 0 | 0.6 | 0 | 1 | 0 | 0 | 1 | 0 | 1 | 0 | 0 | 1 | 1 | 0 | 0 | 1 | 0 | 0 | 1 | 0 | 0 |
| 163 | 0 | 0 | 0 | 0 | 0 | 0 | 0 | 0 | 0 | 0 | 0.6 | 0 | 0 | 0 | 0 | 0 | 0 | 0 | 0 | 0 | 0 |
| 164 | 0 | 1 | 0 | 0 | 0 | 0 | 0 | 0 | 0 | 0 | 0 | 0 | 0 | 0 | 0 | 0.6 | 0 | 0 | 0 | 0 | 0 |
| 165 | 0 | 0 | 0 | 0 | 0 | 0 | 1 | 0 | 0 | 0 | 0 | 0.6 | 0 | 0 | 0 | 0 | 0 | 0 | 0 | 0 | 0 |
| 166 | 0 | 0.6 | 0 | 0 | 0 | 0 | 0 | 0 | 0 | 1 | 1 | 0 | 0 | 0 | 0 | 0 | 0 | 1 | 1 | 0 | 0 |
| 167 | 1 | 0 | 0 | 0 | 0 | 0 | 0.6 | 0 | 0 | 0 | 0 | 0 | 0 | 0 | 0 | 0 | 0 | 0 | 0 | 0 | 0 |
| 168 | 0 | 0 | 0 | 0 | 0 | 0.6 | 0 | 0 | 0 | 0 | 1 | 1 | 0 | 0 | 0 | 0 | 0 | 0 | 0 | 0 | 0 |
| 169 | 1 | 0 | 0 | 0.6 | 0 | 1 | 0 | 0 | 0 | 0 | 0 | 0 | 0 | 0 | 0 | 0 | 0 | 0 | 0 | 1 | 0 |
| 170 | 0 | 0 | 0 | 0 | 0 | 0 | 0 | 0 | 0 | 0 | 0 | 0.6 | 0 | 0 | 0 | 0 | 0 | 1 | 0 | 0 | 0 |
| 171 | 0 | 0 | 0 | 0 | 0 | 0 | 0 | 0 | 1 | 0 | 1 | 0 | 0.6 | 0 | 0 | 0 | 0 | 0 | 0 | 0 | 0 |
| 172 | 0 | 0.6 | 0 | 0 | 0 | 0 | 0 | 0 | 0 | 0 | 0 | 0 | 0 | 0 | 0 | 0 | 0 | 0 | 1 | 0 | 0 |
| 173 | 0 | 0 | 0 | 0 | 0 | 0 | 0.6 | 0 | 0 | 0 | 0 | 0 | 0 | 0 | 0 | 0 | 0 | 0 | 0 | 0 | 0 |
| 174 | 1 | 0 | 0 | 0 | 0 | 0 | 0 | 0 | 0 | 0 | 1 | 0 | 0.6 | 0 | 0 | 0 | 0 | 0 | 0 | 0 | 0 |
| 175 | 0 | 0 | 0 | 0 | 0 | 0 | 0 | 0 | 0 | 0 | 0 | 0 | 1 | 0.6 | 0 | 0 | 0 | 0 | 0 | 0 | 0 |
| 176 | 0 | 0 | 0 | 0 | 0 | 0 | 1 | 0.6 | 0 | 0 | 0 | 0 | 0 | 0 | 0 | 0 | 0 | 0 | 0 | 0 | 0 |
| 177 | 0 | 1 | 0 | 0 | 0 | 0 | 0 | 0 | 0 | 0 | 0 | 1 | 0 | 0 | 0 | 0 | 0.6 | 0 | 0 | 0 | 0 |
| 178 | 1 | 0 | 0 | 0 | 0 | 1 | 0.6 | 1 | 0 | 0 | 0 | 0 | 0 | 0 | 0 | 0 | 0 | 0 | 0 | 1 | 0 |
| 179 | 0 | 0 | 0 | 0 | 0 | 0 | 0 | 1 | 0 | 0 | 0 | 0 | 0 | 0 | 0.6 | 0 | 0 | 0 | 0 | 0 | 0 |
| 180 | 0 | 0 | 0 | 1 | 0 | 0 | 0 | 0 | 0 | 0 | 0 | 1 | 0 | 0 | 0.6 | 0 | 0.6 | 0 | 0 | 0 | 0 |
| 181 | 0 | 0 | 0 | 1 | 0 | 0 | 0.6 | 0 | 0 | 0 | 0 | 0 | 0 | 0 | 0 | 0 | 0 | 0 | 0 | 0 | 0 |
| 182 | 0 | 1 | 0 | 1 | 0 | 0 | 0.6 | 0 | 0 | 0 | 1 | 1 | 0 | 0 | 0 | 0 | 0 | 0 | 0 | 0 | 0 |
| 183 | 0 | 0 | 0 | 0.6 | 0 | 0 | 0 | 0 | 0 | 0 | 0 | 0 | 0 | 1 | 0 | 0 | 0 | 0 | 0 | 0 | 0 |
| 184 | 0 | 0 | 0 | 0 | 0 | 0 | 0 | 0 | 0 | 0 | 0 | 0 | 0 | 0.6 | 0 | 0 | 0 | 0 | 0 | 0 | 0 |
| 185 | 0 | 0 | 0 | 0 | 0 | 0 | 0 | 0 | 0 | 0 | 0.6 | 0 | 0 | 1 | 0 | 0 | 0 | 0 | 0 | 0 | 0 |
| 186 | 0.6 | 0 | 0 | 0 | 0 | 0 | 0 | 0 | 0 | 0 | 0 | 0 | 0 | 0 | 0 | 0 | 0 | 0 | 0 | 1 | 0 |
| 187 | 0 | 0 | 0 | 1 | 0 | 0 | 1 | 0 | 0 | 0 | 0 | 1 | 0 | 0 | 0.6 | 0 | 0 | 0 | 0 | 1 | 0 |
| 188 | 0.6 | 0 | 0 | 0 | 0 | 0 | 0 | 0.6 | 0 | 0 | 0 | 0 | 0 | 1 | 0 | 0 | 0 | 0 | 0 | 0 | 0 |
| 189 | 0 | 1 | 0.6 | 0 | 0 | 0.6 | 0 | 0 | 0 | 0 | 0 | 0 | 0 | 0 | 1 | 1 | 0 | 0 | 0 | 0 | 0 |
| 190 | 0.6 | 0 | 1 | 0 | 1 | 0 | 0 | 0 | 0 | 0 | 0 | 1 | 1 | 0 | 0 | 1 | 1 | 0 | 0 | 0 | 0 |
| 191 | 1 | 0 | 0 | 0 | 0 | 1 | 0 | 0.6 | 0 | 0 | 0 | 1 | 0 | 0 | 0 | 0 | 0 | 0 | 0 | 0 | 0 |
| 192 | 1 | 0 | 0 | 0 | 0 | 0 | 0 | 0 | 0 | 0.6 | 0 | 0 | 0 | 0 | 0 | 0 | 0 | 0 | 1 | 0 | 0 |
| 193 | 0 | 0 | 0 | 0 | 0 | 0 | 0 | 0 | 0 | 1 | 1 | 0 | 0.6 | 0 | 0 | 0 | 1 | 0 | 0 | 1 | 0 |
| 194 | 0 | 0 | 0 | 0 | 0 | 0 | 0 | 0 | 0 | 0 | 0.6 | 0 | 0 | 0 | 0 | 0 | 0 | 0 | 0 | 0 | 0 |
| 195 | 0 | 0 | 0 | 0 | 0 | 0 | 0 | 0 | 0 | 1 | 0 | 0 | 0.6 | 0 | 0 | 0 | 0 | 0 | 0 | 1 | 0 |
| 196 | 0 | 0 | 0 | 0 | 0.6 | 0 | 0 | 0 | 0 | 0 | 0 | 0 | 1 | 0 | 0 | 0 | 0 | 0 | 0 | 0 | 0 |
| 197 | 0 | 0 | 0 | 0 | 0 | 0 | 0 | 0 | 0 | 0 | 0 | 0 | 0 | 0 | 0 | 1 | 0.6 | 0 | 0 | 0 | 0 |
| 198 | 0 | 0 | 0 | 0 | 0 | 0 | 0 | 0 | 0 | 0 | 0 | 0 | 0 | 0 | 0 | 0.6 | 0 | 0 | 0 | 0 | 0 |
| 199 | 0 | 0.6 | 0 | 0 | 0 | 0 | 0 | 0 | 0 | 0 | 0 | 0 | 0 | 0 | 0 | 0 | 0 | 0 | 0 | 0 | 0 |
| 200 | 1 | 0 | 0 | 0 | 0 | 0 | 1 | 0 | 0 | 1 | 0 | 0 | 0 | 0 | 0 | 0 | 0 | 0 | 0 | 0.6 | 0 |
| 201 | 0 | 0 | 0 | 0 | 0 | 0 | 0 | 0 | 0 | 0.6 | 1 | 0 | 0 | 0 | 0 | 0 | 0 | 0 | 0 | 0 | 0 |
| 202 | 0 | 0 | 0 | 0 | 0 | 0 | 0.6 | 0 | 0 | 0 | 0 | 0 | 0 | 0 | 0 | 0 | 0 | 0 | 0 | 0 | 0 |
| 203 | 0.6 | 0 | 0 | 0 | 0 | 0 | 0 | 0 | 0 | 0 | 0 | 0 | 0 | 0 | 0 | 0 | 0 | 0 | 0 | 0 | 0 |
| 204 | 0 | 0 | 0 | 0 | 0 | 0 | 0 | 0 | 0 | 0 | 0 | 0.6 | 0 | 0 | 0 | 0 | 0 | 0 | 0 | 0 | 0 |
| 205 | 0 | 0 | 0 | 0 | 0 | 0 | 0 | 0 | 0 | 0 | 0 | 0 | 0 | 0 | 0 | 0 | 0 | 0 | 0.6 | 0 | 0 |
| 206 | 0 | 0 | 0 | 0 | 0 | 0 | 0 | 0 | 0 | 1 | 0.6 | 0 | 1 | 0 | 0 | 0 | 0 | 0 | 0 | 0 | 0 |
| 207 | 0 | 0 | 0 | 0.6 | 0 | 0 | 0 | 0 | 0 | 0 | 0 | 0 | 0 | 0 | 0 | 0 | 0 | 0 | 0 | 0 | 0 |
| 208 | 0 | 0 | 0 | 0 | 0 | 0 | 0 | 0 | 0 | 0 | 0 | 0 | 0 | 0 | 0 | 0 | 0 | 0 | 0.6 | 0 | 0 |
| 209 | 0 | 0 | 0 | 0 | 0.6 | 0 | 0 | 0 | 0 | 0 | 1 | 0 | 0 | 0 | 0 | 0 | 0 | 0 | 0 | 0 | 0 |
| 210 | 1 | 0 | 0 | 0 | 0 | 1 | 0 | 0 | 0 | 0 | 0 | 0 | 1 | 0 | 0 | 1 | 0.6 | 0 | 0 | 0 | 0 |
| 211 | 0 | 0 | 0 | 0 | 0 | 0 | 0.6 | 0 | 0 | 0 | 0 | 1 | 0 | 0 | 0 | 0 | 1 | 0 | 0 | 0 | 0 |
| 212 | 0 | 0 | 0 | 0 | 0 | 0 | 0 | 0 | 0 | 0 | 0.6 | 0 | 0 | 0 | 0 | 0 | 0 | 1 | 0 | 0 | 0 |
| 213 | 0 | 0 | 0 | 0 | 0 | 0 | 0 | 0 | 0 | 0 | 0 | 0 | 1 | 0 | 0 | 1 | 0.6 | 0 | 0 | 0 | 0 |
| 214 | 0 | 0 | 0.6 | 0 | 0 | 0 | 0 | 1 | 0 | 0 | 0 | 0 | 0 | 0 | 0 | 0 | 0 | 0 | 0 | 0 | 0 |
| 215 | 0 | 1 | 0 | 0 | 0 | 0 | 0 | 0 | 0 | 1 | 1 | 1 | 0 | 0 | 0 | 0 | 0 | 1 | 0 | 0.6 | 0 |
| 216 | 0 | 0 | 0 | 0 | 0 | 1 | 0 | 0 | 0 | 0 | 0 | 0.6 | 0 | 0 | 0 | 0 | 0 | 0 | 0 | 0 | 0 |
| 217 | 0 | 0 | 0 | 0 | 0 | 0 | 0 | 0 | 0 | 1 | 0 | 0 | 0 | 0 | 0 | 0 | 0 | 0 | 0 | 0.6 | 0 |
| 218 | 0 | 0 | 0 | 0 | 0 | 0 | 0 | 0 | 0 | 0 | 0 | 0 | 0 | 0 | 0 | 0 | 0 | 0 | 0 | 0.6 | 0 |
| 219 | 0 | 0 | 0 | 0 | 0 | 0 | 0 | 0 | 0 | 0 | 0 | 0 | 0 | 0 | 0.6 | 0 | 0 | 0 | 0 | 0 | 0 |
| 220 | 0 | 0 | 0 | 0 | 0 | 0 | 0 | 0 | 0 | 0 | 0 | 0 | 0 | 0 | 0 | 0 | 0 | 0 | 0 | 0.6 | 0 |
| 221 | 0 | 0 | 0 | 0 | 0 | 0 | 0 | 0.6 | 0 | 0 | 0 | 0 | 0 | 0 | 0 | 0 | 0 | 0 | 0 | 0 | 0 |
| 222 | 1 | 0 | 0 | 0 | 0 | 0 | 0 | 0 | 0 | 0 | 0 | 0 | 0 | 0 | 0.6 | 0 | 0 | 0 | 0 | 0 | 0 |
| 223 | 0 | 0 | 0 | 0 | 0 | 0 | 0 | 0 | 0 | 0 | 0 | 0 | 0 | 0 | 0.6 | 1 | 1 | 0 | 0 | 0 | 0 |
| 224 | 0 | 0 | 0 | 0 | 0 | 0 | 0 | 0 | 0 | 0 | 0 | 0 | 0 | 0.6 | 0 | 0 | 0 | 0 | 1 | 1 | 0 |
| 225 | 0 | 0 | 0 | 0 | 0 | 0.6 | 0 | 0 | 0 | 0 | 1 | 0 | 0 | 0 | 0 | 0 | 0 | 0 | 0 | 0 | 0 |
| 226 | 0 | 0 | 0 | 0.6 | 0 | 0 | 0 | 0 | 0 | 0 | 0 | 0 | 0 | 0 | 0 | 0 | 1 | 0 | 0 | 1 | 0 |
| 227 | 1 | 0 | 0 | 0 | 0 | 0 | 0 | 0 | 0 | 0 | 1 | 0 | 0 | 0 | 0.6 | 0 | 0 | 0 | 0 | 0 | 0 |
| 228 | 0 | 0 | 1 | 0 | 0 | 0 | 0 | 0 | 0 | 0 | 0.6 | 0 | 0 | 0 | 0 | 0 | 1 | 0 | 0 | 1 | 0 |
| 229 | 0 | 0 | 0 | 0 | 0 | 0 | 0 | 0 | 0 | 0 | 0 | 0 | 0 | 1 | 1 | 0 | 0.6 | 0 | 1 | 0 | 0 |
| 230 | 0 | 0 | 1 | 1 | 0 | 0 | 0.6 | 0 | 0 | 0 | 1 | 0 | 0 | 0 | 0 | 1 | 0 | 0 | 0 | 0 | 0 |
| 231 | 0 | 0 | 0 | 0.6 | 0 | 0 | 0 | 0 | 0 | 0 | 0 | 0 | 0 | 0 | 0 | 0 | 0 | 0 | 0 | 0 | 0 |
| 232 | 1 | 0 | 1 | 1 | 0 | 0 | 1 | 0 | 0 | 0.6 | 1 | 0 | 0 | 0 | 0 | 0 | 0 | 0 | 0 | 0 | 0 |
| 233 | 0 | 1 | 0 | 0.6 | 0 | 0 | 0 | 1 | 0 | 0 | 0 | 0 | 0 | 0 | 0 | 1 | 0 | 0 | 1 | 0 | 0 |
| 234 | 0 | 0 | 0 | 0.6 | 0 | 0 | 0 | 0 | 0 | 0 | 0 | 0 | 0 | 0 | 0 | 0 | 0 | 0 | 0 | 0 | 0 |
| 235 | 0 | 0 | 0 | 0 | 0 | 0 | 0 | 0 | 0 | 1 | 0 | 1 | 1 | 0 | 0.6 | 1 | 0 | 0 | 0 | 1 | 0 |
| 236 | 0 | 0 | 0 | 0 | 0 | 0 | 0.6 | 0 | 0 | 0 | 0 | 0 | 0 | 0 | 0 | 0 | 0 | 0 | 0 | 0 | 0 |
| 237 | 0 | 0 | 0 | 0 | 0 | 0 | 0 | 0 | 0 | 0 | 0.6 | 0 | 0 | 0 | 0 | 0 | 0 | 0 | 0 | 0 | 0 |
| 238 | 0 | 0 | 0 | 0 | 0 | 0 | 0 | 0 | 0 | 0.6 | 0 | 0 | 0.6 | 0 | 0 | 0 | 0 | 0 | 0 | 0 | 0 |
| 239 | 0 | 1 | 0 | 0.6 | 0 | 0 | 0 | 0 | 0 | 0 | 0 | 1 | 0 | 0 | 0 | 0 | 0 | 0 | 0 | 0 | 0 |
| 240 | 0 | 0 | 0 | 0 | 0 | 0 | 0 | 0 | 0 | 0 | 0 | 0 | 0 | 0 | 0 | 0 | 0 | 0.6 | 0 | 0 | 0 |
| 241 | 0 | 0 | 0 | 0 | 0 | 0 | 0 | 0 | 0 | 0 | 0.6 | 0 | 0 | 0 | 0 | 0 | 0 | 0 | 0 | 0 | 0 |
| 242 | 0 | 0 | 0 | 0.6 | 0 | 0 | 0 | 1 | 0 | 0 | 0 | 0 | 0 | 0 | 0 | 0 | 0 | 0 | 0 | 0 | 0 |
| 243 | 0 | 0 | 0 | 0 | 0 | 0 | 0 | 0 | 0 | 0 | 0 | 1 | 0 | 0 | 0 | 0 | 0.6 | 0 | 0 | 0 | 0 |
| 244 | 0 | 0 | 0 | 0 | 0 | 0 | 0 | 0 | 0 | 0 | 0 | 0.6 | 0 | 0 | 0 | 0 | 0 | 0 | 0 | 0 | 0 |
| 245 | 0 | 0 | 0 | 1 | 0 | 0 | 0 | 0 | 0 | 0 | 0 | 0 | 0 | 0 | 0.6 | 0 | 0 | 0 | 0 | 0 | 0 |
| 246 | 0 | 0 | 0 | 0 | 0 | 0 | 0.6 | 0 | 0 | 0 | 1 | 0 | 0 | 0 | 1 | 0 | 1 | 0 | 0 | 0 | 0 |
| 247 | 0 | 0 | 0.6 | 0 | 0 | 0 | 0 | 0 | 0.6 | 0 | 0 | 0 | 0 | 0 | 0 | 0 | 0 | 0 | 0 | 0 | 0 |
| 248 | 1 | 0 | 0 | 0 | 0 | 0 | 0 | 0 | 0 | 0 | 0 | 0 | 0 | 0 | 0 | 0.6 | 0 | 0 | 0 | 0 | 0 |
| 249 | 0 | 0 | 0 | 0 | 0 | 0 | 0 | 0 | 0 | 0 | 0 | 0 | 0 | 0 | 0 | 0 | 1 | 0 | 0 | 0.6 | 0 |
| 250 | 0 | 0 | 0 | 0 | 0 | 0 | 0 | 0 | 0 | 0 | 0 | 0 | 0 | 0 | 0 | 0 | 0 | 0 | 0 | 0.6 | 0 |
| 251 | 0 | 0 | 0 | 0 | 0 | 0 | 0 | 0 | 0 | 0 | 0 | 0 | 0 | 1 | 0 | 0 | 0 | 0 | 0.6 | 0 | 0 |
| 252 | 0 | 0 | 0 | 0 | 0 | 0 | 0 | 0 | 0 | 0 | 0 | 0 | 0 | 0 | 0 | 0 | 0 | 0 | 0 | 0.6 | 0 |
| 253 | 0 | 0 | 0 | 0 | 0 | 0 | 0 | 0 | 0 | 0 | 0 | 0 | 0 | 0 | 0 | 0.6 | 0 | 0 | 0 | 0 | 0 |
| 254 | 0 | 0 | 0 | 0 | 0 | 0 | 0 | 0 | 0 | 0 | 0 | 0 | 0 | 0.6 | 0 | 0 | 0 | 0 | 0 | 0 | 0 |
| 255 | 0 | 0 | 0 | 0 | 0 | 0 | 0 | 0.6 | 0 | 0 | 0 | 0 | 0 | 0 | 0 | 0 | 0 | 0 | 0 | 0 | 0 |
| 256 | 0 | 0 | 0 | 0 | 0 | 0 | 0 | 0 | 0 | 0 | 0 | 0 | 0 | 0 | 0 | 0.6 | 0 | 0 | 0 | 0 | 0 |
| 257 | 0 | 0 | 0 | 0 | 0 | 0 | 0.6 | 0 | 0 | 0 | 0 | 0 | 0 | 0 | 0 | 0 | 0 | 0 | 0 | 0 | 0 |
| 258 | 0.6 | 0 | 0 | 0 | 0 | 0 | 0 | 0 | 0 | 0 | 0 | 0 | 0 | 0 | 0 | 0 | 0 | 0 | 0.6 | 0 | 0 |
| 259 | 0 | 0 | 0 | 0 | 0 | 0 | 0 | 0 | 0 | 0 | 0 | 0 | 0 | 0.6 | 0 | 0 | 0 | 0 | 0 | 0 | 0 |
| 260 | 0 | 0 | 0 | 0 | 0 | 0 | 0 | 0 | 0 | 0 | 0.6 | 0 | 0 | 0 | 0 | 0 | 0 | 0 | 0 | 0 | 0 |
| 261 | 0 | 0 | 0 | 0 | 0 | 0 | 0 | 0 | 0 | 0 | 0 | 0 | 0 | 0 | 0 | 0.6 | 0 | 0 | 0 | 0 | 0 |
| 262 | 0 | 0.6 | 0 | 0 | 0 | 0 | 0 | 0 | 0 | 0 | 0 | 1 | 0 | 0 | 0 | 0 | 0 | 0 | 0 | 0 | 0 |
| 263 | 0 | 0 | 0 | 0 | 0 | 0 | 0.6 | 0 | 0 | 0 | 0 | 0 | 0 | 0 | 0 | 0 | 0 | 0 | 0 | 0 | 0 |
| 264 | 0 | 0 | 0 | 0.6 | 0 | 1 | 0 | 0 | 0 | 0 | 0 | 0 | 0 | 0 | 0 | 0 | 0 | 0 | 0 | 0 | 0 |
| 265 | 0 | 0 | 0 | 0 | 0 | 0 | 0 | 0 | 0 | 0 | 1 | 0 | 0.6 | 0 | 0 | 0 | 0 | 0 | 0 | 0 | 0 |
| 266 | 0 | 0 | 0 | 0 | 0 | 0 | 0.6 | 0 | 0 | 0 | 0 | 0 | 0 | 0 | 0 | 0 | 0 | 0 | 0 | 0 | 0 |
| 267 | 0 | 0 | 0 | 0 | 0 | 0 | 0.6 | 0 | 0 | 0 | 0 | 0 | 0 | 0 | 0 | 0 | 0 | 0 | 0 | 0 | 0 |
| 268 | 0 | 0 | 0 | 0 | 0 | 0 | 0 | 0 | 0 | 1 | 1 | 0 | 0 | 0 | 0 | 0 | 0 | 0 | 0 | 0.6 | 0 |
| 269 | 0.6 | 0 | 0 | 0 | 0 | 0 | 0 | 0 | 0 | 0 | 0 | 0 | 0 | 0 | 0 | 0 | 0 | 0 | 0 | 0 | 0 |
| 270 | 0 | 0 | 0 | 0 | 0 | 0 | 0 | 0 | 1 | 0 | 0 | 0 | 0 | 0.6 | 0 | 0 | 0 | 1 | 0 | 0 | 0 |
| 271 | 0 | 0 | 0 | 0 | 0 | 0 | 0 | 0.6 | 0 | 0 | 0 | 0 | 0 | 0 | 0 | 0 | 0 | 0 | 0 | 0 | 0 |
| 272 | 0 | 0 | 0 | 0 | 0 | 0 | 0 | 0 | 0 | 0 | 0.6 | 0 | 0 | 0 | 0 | 0 | 0 | 0 | 0 | 0 | 0 |
| 273 | 0 | 0 | 0 | 0 | 0 | 0 | 0.6 | 0 | 0 | 0 | 0 | 0 | 0 | 0 | 0 | 0 | 0 | 0 | 0 | 1 | 0 |
| 274 | 0 | 0 | 0 | 0 | 0 | 0 | 0 | 0 | 0 | 0 | 0.6 | 0 | 0 | 0 | 0 | 0 | 0 | 0 | 0 | 0 | 0 |
| 275 | 0 | 0 | 0 | 0 | 0 | 0 | 0 | 0 | 0 | 0 | 0 | 0 | 0 | 0 | 0 | 0.6 | 0 | 0 | 0 | 0 | 0 |
| 276 | 0 | 0 | 0.6 | 0 | 0 | 0 | 0 | 0.6 | 0 | 0 | 0 | 0 | 0 | 0 | 0 | 0 | 0 | 0 | 0 | 0 | 0 |
| 277 | 1 | 0 | 0 | 0 | 0 | 0 | 0 | 0 | 0 | 1 | 0 | 0 | 0 | 0 | 0 | 1 | 0 | 0 | 0 | 0.6 | 0 |
| 278 | 0 | 0 | 0.6 | 0 | 0 | 0 | 0 | 0 | 0 | 0 | 0 | 0 | 0 | 0 | 0 | 0 | 0 | 0 | 0 | 0 | 0 |
| 279 | 1 | 0 | 0 | 0 | 0 | 0 | 0 | 0 | 0 | 0 | 0 | 0 | 0 | 0.6 | 0 | 0 | 0 | 0 | 0 | 0 | 0 |
| 280 | 0 | 0 | 0 | 0 | 0 | 0 | 0 | 0 | 0 | 0.6 | 0 | 0 | 0 | 0 | 0 | 0 | 0 | 0 | 0 | 0 | 0 |
| 281 | 0 | 0 | 0 | 0 | 0 | 0 | 0 | 0 | 0 | 1 | 0 | 0 | 0 | 0 | 0 | 0 | 0 | 0.6 | 0 | 0 | 0 |
| 282 | 0 | 0 | 0 | 0 | 0 | 0 | 0 | 0 | 0 | 0 | 0 | 0 | 0 | 0 | 0 | 0 | 0 | 0 | 0 | 0.6 | 0 |
| 283 | 0.6 | 0 | 0 | 0 | 0 | 0 | 0 | 0 | 0 | 0 | 0 | 0 | 0 | 0 | 0 | 0 | 0 | 0 | 0 | 1 | 0 |
| 284 | 0 | 0.6 | 0 | 0 | 0 | 0 | 0 | 0 | 0 | 0 | 0 | 0 | 0 | 0 | 0 | 0 | 0 | 0 | 0 | 0 | 0 |
| 285 | 0 | 0 | 0 | 0 | 0 | 0 | 0 | 0 | 0 | 0 | 0 | 0 | 0 | 0.6 | 0 | 0 | 0 | 0 | 0 | 0 | 0 |
| 286 | 0 | 0 | 0 | 0 | 0 | 0 | 0 | 0 | 0 | 0 | 0 | 0 | 0 | 0 | 0.6 | 0 | 0 | 0 | 0 | 0 | 0 |
| 287 | 0 | 0 | 0 | 0 | 0 | 0 | 0 | 0 | 0 | 0 | 0 | 0.6 | 0 | 0 | 0 | 0 | 0 | 0 | 0 | 0 | 0 |
| 288 | 0 | 0 | 0 | 0 | 0 | 0 | 0 | 0.6 | 0 | 0 | 0 | 0 | 0 | 0 | 0 | 0 | 0 | 0 | 0 | 0 | 0 |
| 289 | 1 | 1 | 0 | 0 | 0 | 0 | 0.6 | 0 | 0 | 0 | 0 | 0 | 0 | 0 | 0 | 0 | 0 | 0 | 0 | 1 | 0 |
| 290 | 0 | 1 | 0 | 0 | 0 | 0 | 0.6 | 0 | 0 | 0 | 0 | 1 | 0 | 0 | 0 | 0 | 0 | 0 | 0 | 0 | 0 |
| 291 | 1 | 1 | 0 | 0 | 0 | 0.6 | 0 | 0 | 0 | 1 | 1 | 0 | 0 | 0 | 0 | 0 | 0 | 0 | 0 | 1 | 0 |
| 292 | 0 | 0.6 | 0.6 | 0 | 0 | 0 | 0 | 0 | 1 | 0 | 1 | 0 | 0 | 0 | 0 | 0 | 1 | 0 | 0 | 0 | 0 |
| 293 | 1 | 0 | 0 | 0 | 0 | 0 | 0 | 0 | 0 | 0 | 0.6 | 0 | 0 | 0 | 0 | 0 | 0 | 0 | 0 | 0 | 0 |
| 294 | 0 | 0 | 0 | 0 | 0 | 0 | 0.6 | 0 | 0 | 1 | 0 | 0 | 0 | 0 | 0 | 0 | 0 | 0 | 0 | 0 | 0 |
| 295 | 0 | 0 | 0 | 0.6 | 0 | 0 | 1 | 0 | 0 | 0 | 0 | 0 | 0 | 0 | 0 | 0 | 0 | 0 | 0 | 0 | 0 |
| 296 | 1 | 0 | 0 | 0 | 0 | 0 | 0 | 0 | 0 | 0 | 0 | 0 | 0 | 0 | 0 | 0 | 0 | 0 | 0 | 0.6 | 0 |
| 297 | 0 | 0 | 0 | 0 | 0 | 0 | 0 | 0 | 0 | 0 | 0.6 | 0 | 0 | 0 | 0 | 0 | 0 | 0 | 0 | 0 | 0 |
| 298 | 0 | 0 | 0 | 0 | 0 | 0 | 0 | 0 | 0 | 0 | 0 | 0 | 0 | 0 | 0.6 | 0 | 0 | 0 | 0 | 0 | 0 |
| 299 | 0 | 1 | 0 | 0 | 0 | 0 | 0 | 0 | 0 | 0 | 0 | 0.6 | 0 | 0 | 1 | 1 | 0 | 0 | 0 | 0 | 0 |
| 300 | 0 | 0 | 0 | 0 | 0 | 0 | 0 | 0.6 | 0 | 0 | 0 | 0 | 0 | 0 | 0 | 0 | 0 | 0 | 0 | 0 | 0 |
| 301 | 0 | 0 | 0 | 0 | 0 | 0 | 0 | 0 | 0 | 0 | 0 | 0 | 0 | 0.6 | 0 | 0 | 1 | 0 | 0 | 0 | 0 |
| 302 | 0 | 0 | 0 | 0 | 0 | 0 | 0 | 0 | 0 | 0 | 0.6 | 0 | 0 | 0 | 0 | 1 | 0 | 0 | 0 | 0 | 0 |
| 303 | 0 | 0 | 0 | 1 | 0 | 0 | 0.6 | 0 | 0 | 0 | 0 | 0 | 0 | 0 | 0 | 0 | 0 | 0 | 0 | 0 | 0 |
| 304 | 0 | 0.6 | 0 | 0 | 0 | 0 | 0 | 0 | 0 | 0 | 0 | 0 | 0 | 0 | 0 | 0 | 0 | 0 | 0 | 0 | 0 |
| 305 | 0 | 0 | 0 | 0 | 0 | 0 | 0 | 1 | 0 | 1 | 0 | 0 | 0 | 0 | 0 | 0 | 0 | 0 | 0 | 0.6 | 0 |
| 306 | 0 | 1 | 0 | 0 | 0 | 0 | 0 | 0.6 | 0 | 0 | 0 | 0 | 0 | 0 | 0 | 0 | 0 | 0 | 0 | 0 | 0 |
| 307 | 0 | 0 | 0 | 0.6 | 0 | 0 | 1 | 0 | 0 | 0 | 0 | 0 | 0 | 0 | 0 | 0 | 0 | 0 | 0 | 0 | 0 |
| 308 | 0 | 0.6 | 0 | 0 | 0 | 0 | 0 | 0 | 0 | 0 | 0 | 0 | 0 | 0 | 0 | 0 | 0 | 0 | 0 | 0 | 0 |
| 309 | 1 | 0 | 0 | 0 | 0 | 0 | 0 | 0.6 | 0 | 0 | 0 | 0 | 0 | 0 | 0 | 0 | 0 | 0 | 0 | 0 | 0 |
| 310 | 0 | 0.6 | 0 | 0 | 0 | 0 | 0 | 0 | 0 | 0 | 0 | 0 | 1 | 0 | 0 | 0 | 0 | 0 | 1 | 0 | 0 |
| 311 | 0 | 0 | 0 | 0 | 0 | 0 | 0 | 0 | 0 | 0 | 0 | 0 | 0 | 0 | 0 | 0 | 0 | 1 | 0 | 0.6 | 0 |
| 312 | 0 | 1 | 0 | 0 | 0 | 0 | 0 | 0 | 0 | 0 | 0.6 | 0 | 0 | 0 | 0 | 0 | 0 | 0 | 0 | 0 | 0 |
| 313 | 0 | 0 | 0 | 0.6 | 0 | 0 | 0 | 0 | 0 | 0 | 0 | 0 | 0 | 0 | 1 | 0 | 1 | 0 | 0 | 0 | 0 |
| 314 | 0 | 0 | 0 | 0 | 0 | 0 | 0 | 0 | 0.6 | 0 | 0 | 0 | 0 | 0 | 0 | 0 | 0 | 0 | 0 | 0 | 0 |
| 315 | 0 | 0 | 0 | 0 | 0 | 0 | 0 | 0 | 0 | 0 | 0.6 | 0 | 0 | 0 | 0 | 0 | 0 | 0 | 0 | 0 | 0 |
| 316 | 0 | 0 | 0 | 0 | 0 | 0 | 0 | 0 | 0 | 0 | 0 | 0 | 0 | 0 | 0 | 0 | 0 | 0 | 0 | 0.6 | 0 |
| 317 | 0 | 0 | 0 | 0 | 0 | 0 | 0 | 0 | 0 | 0 | 0 | 0 | 0 | 0 | 0.6 | 0 | 0 | 0 | 0 | 0 | 0 |
| 318 | 0 | 0 | 0 | 0 | 0 | 0.6 | 0 | 0 | 0 | 0 | 0 | 0 | 0 | 0 | 0 | 0 | 0 | 0 | 0 | 0 | 0 |
| 319 | 0.6 | 0 | 0 | 0 | 0 | 0 | 0 | 0 | 0 | 0 | 0 | 0 | 0 | 0 | 0 | 0 | 0 | 0 | 0 | 0 | 0 |
| 320 | 0 | 0 | 0 | 0 | 1 | 0 | 0 | 0 | 0.6 | 0 | 0 | 0 | 0 | 0 | 0 | 0 | 0 | 0 | 0 | 0 | 0 |
| 321 | 0 | 0 | 0 | 0 | 0 | 0 | 0 | 0 | 0 | 0.6 | 0 | 0 | 0 | 0 | 0 | 0 | 0 | 0 | 0 | 0 | 0 |
| 322 | 0 | 0 | 0 | 0 | 0 | 0 | 0 | 0 | 0 | 0 | 0.6 | 0 | 0 | 0 | 0 | 0 | 0 | 0 | 0 | 0 | 0 |
| 323 | 0 | 0 | 0.6 | 0 | 0 | 0 | 0 | 0 | 0 | 0 | 0 | 1 | 0 | 0 | 0 | 1 | 0 | 0 | 0 | 0 | 0 |
| 324 | 0 | 0 | 0 | 0 | 0 | 0 | 0 | 0 | 0.6 | 0 | 0 | 0 | 0 | 0 | 0 | 0 | 0 | 0 | 0 | 0 | 0 |
| 325 | 0 | 0 | 0 | 0 | 0 | 0 | 0 | 0 | 0 | 0 | 0 | 1 | 0 | 0 | 0.6 | 1 | 0 | 0 | 0 | 0 | 0 |
| 326 | 1 | 0 | 0 | 0 | 0 | 0 | 0 | 0 | 0 | 0 | 0 | 0 | 0 | 0 | 0 | 0.6 | 0 | 0 | 0 | 0 | 0 |
| 327 | 0 | 0 | 0 | 0 | 0 | 0 | 0 | 0 | 0 | 1 | 0 | 0 | 0 | 0 | 0 | 0 | 0.6 | 0 | 0 | 1 | 0 |
| 328 | 0 | 0 | 0 | 0 | 0 | 0 | 0 | 0.6 | 0 | 0 | 0 | 0 | 0 | 0 | 0 | 0 | 0 | 0 | 0 | 0 | 0 |
| 329 | 0 | 0 | 0 | 0 | 0 | 0 | 0 | 0.6 | 0 | 0 | 0 | 0 | 0 | 0 | 0 | 0 | 0 | 0 | 0 | 0 | 0 |
| 330 | 0 | 0 | 0 | 0 | 0 | 0 | 0 | 0 | 0 | 0 | 0 | 0 | 0 | 0.6 | 0 | 0 | 0 | 0 | 0 | 0 | 0 |
| 331 | 0 | 0 | 0 | 0 | 0 | 0 | 0 | 0 | 0 | 0.6 | 0 | 0 | 1 | 0 | 0 | 0 | 0 | 0 | 0 | 1 | 0 |
| 332 | 0 | 0 | 0 | 0 | 0 | 0 | 0 | 0 | 0 | 0 | 0 | 0 | 0 | 0 | 0 | 0.6 | 0 | 0 | 0 | 0 | 0 |
| 333 | 0 | 0 | 0 | 0 | 0 | 0 | 0 | 0 | 0.6 | 0 | 0 | 0 | 0 | 0 | 0 | 0 | 0 | 0 | 0 | 0 | 0 |
| 334 | 0 | 0 | 0 | 0 | 0.6 | 0 | 0 | 0 | 0 | 0 | 0 | 0 | 0 | 0 | 0 | 0 | 0 | 0 | 0 | 0 | 0 |
| 335 | 0 | 0 | 0 | 0 | 0 | 0 | 0 | 0.6 | 0 | 0 | 0 | 0 | 0 | 0 | 0 | 0 | 0 | 0 | 0 | 0 | 0 |
| 336 | 0 | 0 | 0 | 0 | 0 | 0 | 0 | 0 | 0 | 0 | 0 | 0 | 0 | 0 | 0 | 0 | 0 | 0.6 | 0 | 0 | 0 |
| 337 | 0 | 0 | 0.6 | 0 | 0 | 0 | 0 | 0 | 0 | 0 | 0 | 0 | 0 | 0 | 0 | 0 | 0 | 0 | 0 | 0 | 0 |
| 338 | 0 | 0 | 0 | 0 | 0 | 0 | 0 | 0 | 0 | 0 | 0 | 0 | 0 | 0 | 0 | 0.6 | 0 | 0 | 0 | 0 | 0 |
| 339 | 0 | 0 | 0 | 0 | 0 | 0 | 0 | 0 | 0 | 1 | 0 | 0 | 0 | 0 | 0 | 0 | 0 | 1 | 0 | 0.6 | 0 |
| 340 | 0 | 0 | 0 | 0 | 0 | 0 | 0 | 0 | 0 | 0 | 1 | 0 | 0.6 | 0 | 0 | 0 | 0 | 0 | 0 | 0 | 0 |
| 341 | 0 | 0 | 0 | 0 | 0 | 0 | 0.6 | 0 | 0 | 0 | 0 | 0 | 0 | 0 | 0 | 0 | 0 | 0 | 0 | 0 | 0 |
| 342 | 1 | 0 | 0 | 0 | 0 | 0 | 0 | 0 | 0 | 0 | 0 | 0 | 0 | 0 | 0 | 0.6 | 0 | 0 | 0 | 0 | 0 |
| 343 | 0 | 0 | 0 | 0 | 0 | 0 | 0 | 0 | 0 | 0.6 | 1 | 0 | 0 | 0 | 0 | 0 | 0 | 0 | 0 | 0 | 0 |
| 344 | 0 | 0 | 0 | 0.6 | 0 | 0 | 0 | 0 | 1 | 0 | 0 | 0 | 0 | 0 | 0 | 0 | 0 | 0 | 1 | 0 | 0 |
| 345 | 0 | 0 | 0 | 0 | 0 | 0 | 0 | 0 | 0 | 0 | 0 | 0 | 0 | 0.6 | 0 | 0 | 0 | 0 | 0 | 0 | 0 |
| 346 | 0 | 0 | 0 | 0 | 0 | 0 | 0 | 0.6 | 0 | 0 | 0 | 0 | 0 | 0 | 0 | 0 | 0 | 0 | 0 | 0 | 0 |
| 347 | 0 | 0 | 0 | 0 | 0 | 0 | 0 | 0 | 0 | 0 | 0 | 0 | 0 | 0 | 0 | 0 | 0 | 0 | 0 | 0.6 | 0 |
| 348 | 0 | 0 | 0 | 0 | 0 | 0 | 0 | 0 | 0 | 0 | 0 | 0 | 0 | 0 | 0.6 | 0 | 0 | 0 | 0 | 0 | 0 |
| 349 | 0 | 0 | 0 | 0 | 0 | 0 | 0 | 0 | 0 | 0.6 | 0 | 0 | 0 | 0 | 0 | 0 | 0 | 0 | 0 | 0 | 0 |
| 350 | 0 | 0 | 0 | 0 | 0 | 0 | 0 | 0 | 0 | 0.6 | 0 | 0 | 0 | 0 | 0 | 0 | 0 | 0 | 0 | 0 | 0 |
| 351 | 0.6 | 0 | 0 | 0 | 0 | 0 | 0 | 0 | 0 | 0 | 0 | 0 | 0 | 0 | 0 | 0 | 0 | 0 | 0 | 0 | 0 |
| 352 | 0 | 0 | 0 | 0 | 0 | 0 | 0 | 0 | 0 | 0 | 0 | 0 | 0.6 | 0 | 0 | 0 | 0 | 0 | 0 | 0 | 0 |
| 353 | 0 | 0 | 0 | 0 | 0 | 0 | 0 | 0 | 0 | 0 | 0 | 0 | 0 | 0 | 0.6 | 0 | 0 | 0 | 0 | 0 | 0 |
| 354 | 0 | 0 | 0 | 0 | 0 | 0 | 0 | 0 | 0 | 0 | 0 | 0 | 0.6 | 0 | 0 | 0 | 0 | 0 | 0 | 0 | 0 |
| 355 | 0 | 0 | 0 | 0 | 0 | 0.6 | 0 | 0 | 0 | 0 | 0 | 0 | 0 | 0 | 0 | 0 | 0 | 0 | 0 | 0 | 0 |
| 356 | 0 | 0 | 0 | 0 | 0 | 0 | 0 | 0 | 0 | 0 | 0 | 0 | 0 | 0 | 0 | 0 | 0 | 0.6 | 0 | 0 | 0 |
| 357 | 0 | 0 | 0 | 0.6 | 0 | 0 | 0 | 0 | 0 | 0 | 0 | 0 | 0 | 0 | 0 | 0 | 0 | 0 | 0 | 0 | 0 |
| 358 | 0 | 0 | 0 | 0 | 0 | 0.6 | 0 | 0 | 0 | 0 | 0 | 0 | 0 | 0 | 0 | 0 | 0 | 0 | 0 | 0 | 0 |
| 359 | 0 | 0 | 0 | 0 | 0 | 0 | 0 | 0 | 0 | 0 | 0 | 0 | 0 | 0 | 0.6 | 0 | 0 | 0 | 0 | 0 | 0 |
| 360 | 0 | 0 | 0 | 0 | 0 | 0 | 0 | 0 | 0 | 0.6 | 0 | 0 | 0 | 0 | 0 | 0 | 0 | 0 | 0 | 0 | 0 |
| 361 | 0 | 0 | 0.6 | 0 | 0 | 0 | 0 | 0 | 0 | 0 | 0 | 0 | 0 | 0 | 0 | 0 | 0 | 0 | 0 | 0 | 0 |
| 362 | 0.6 | 0 | 0 | 0 | 0 | 0 | 0 | 0 | 0 | 0 | 0 | 0 | 0 | 0 | 0 | 0 | 0 | 0 | 0 | 0 | 0 |
| 363 | 0 | 0.6 | 0 | 0 | 0 | 0 | 0 | 0 | 0 | 0 | 0 | 0 | 0 | 0 | 0 | 0 | 0 | 0 | 0 | 0 | 0 |
| 364 | 0 | 0 | 0 | 0 | 0 | 0 | 0 | 0 | 0 | 0 | 0.6 | 0 | 0 | 0 | 0 | 0 | 0 | 0 | 0 | 0 | 0 |
| 365 | 0 | 0 | 0 | 0 | 0 | 0 | 0 | 0 | 0 | 1 | 0.6 | 0 | 1 | 0 | 0 | 0 | 0 | 0 | 0 | 1 | 0 |
| 366 | 0 | 1 | 1 | 0 | 0 | 0 | 0 | 0 | 0 | 0 | 0 | 0 | 0 | 0 | 0 | 0 | 0 | 0 | 0 | 0.6 | 0 |
| 367 | 0 | 0 | 0 | 0 | 0 | 0 | 0.6 | 0 | 0 | 0 | 0 | 0 | 0 | 0 | 0 | 0 | 0 | 0 | 0 | 0 | 0 |
| 368 | 0 | 0 | 0 | 0 | 0 | 0 | 0 | 0 | 0 | 0 | 0.6 | 0 | 1 | 0 | 0 | 0 | 0 | 1 | 0 | 0 | 0 |
| 369 | 0 | 0 | 0 | 0 | 0 | 0 | 0 | 0.6 | 0 | 0 | 0 | 0 | 0 | 0 | 0 | 0 | 0 | 0 | 0 | 0 | 0 |
| 370 | 0 | 0 | 0 | 0 | 0 | 0 | 0 | 0 | 0 | 1 | 0 | 0 | 0 | 0 | 0 | 0 | 0 | 0 | 0 | 0.6 | 0 |
| 371 | 0.6 | 0 | 0 | 0 | 0 | 0 | 0 | 0 | 0 | 0 | 0 | 0 | 0 | 0 | 0 | 0 | 0 | 0 | 0 | 0 | 0 |
| 372 | 0 | 0 | 0 | 0 | 0 | 0 | 0 | 0 | 0 | 0 | 0 | 0 | 0 | 0 | 0 | 0 | 0 | 0 | 0 | 0.6 | 0 |
| 373 | 0 | 0 | 0 | 0 | 0 | 0 | 0.6 | 0 | 0 | 0 | 0 | 0 | 0 | 0 | 0 | 0 | 0 | 0 | 0 | 0 | 0 |
| 374 | 0 | 0 | 0 | 0 | 0 | 0 | 0 | 0 | 0 | 0.6 | 0 | 0 | 0 | 0 | 0 | 0 | 0 | 0 | 0 | 1 | 0 |
| 375 | 0 | 1 | 0 | 0 | 0 | 0 | 0 | 0 | 0 | 0 | 0 | 0 | 0 | 0 | 0.6 | 1 | 0 | 0 | 0 | 0.6 | 0 |
| 376 | 0 | 0.6 | 0 | 0 | 0 | 0 | 0 | 0 | 0 | 0 | 0 | 0 | 0 | 0 | 0 | 0 | 0 | 0 | 0 | 0 | 0 |
| 377 | 0 | 1 | 0 | 0.6 | 0 | 1 | 0 | 0 | 0 | 0 | 0 | 0 | 0 | 0 | 0 | 0 | 0 | 0 | 0 | 0 | 0 |
| 378 | 0 | 0 | 0 | 1 | 0 | 0 | 0.6 | 0 | 0 | 0 | 0 | 0 | 0 | 0 | 0 | 0 | 0 | 0 | 0 | 0 | 0 |
| 379 | 0 | 0 | 1 | 0.6 | 0 | 0 | 1 | 0 | 0 | 0 | 1 | 0 | 0 | 0 | 0 | 0 | 0 | 0 | 0 | 0 | 0 |
| 380 | 0 | 0 | 0 | 0 | 0 | 0 | 0 | 0.6 | 0 | 0 | 0 | 0 | 0 | 0 | 0 | 0 | 0 | 0 | 0 | 0 | 0 |
| 381 | 0 | 0.6 | 0 | 0 | 0 | 0 | 0 | 0 | 0 | 0 | 0 | 1 | 0 | 0 | 0 | 1 | 0 | 0 | 0 | 0 | 0 |
| 382 | 0 | 0 | 0 | 0 | 0 | 0 | 0 | 0 | 0 | 0.6 | 0 | 0 | 0 | 0 | 0 | 0 | 0 | 0 | 0 | 0.6 | 0 |
| 383 | 0 | 0 | 0 | 0 | 0 | 0 | 0 | 0 | 0.6 | 0 | 0 | 0 | 0 | 0 | 1 | 0 | 0 | 0 | 0 | 0 | 0 |
| 384 | 0 | 0.6 | 0 | 0 | 0 | 0 | 0 | 0 | 0 | 0 | 0 | 0 | 0 | 0 | 0 | 0 | 0 | 0 | 0 | 0 | 0 |
| 385 | 0.6 | 0 | 1 | 1 | 0 | 0 | 1 | 0.6 | 0 | 0 | 0 | 0 | 0 | 0 | 0 | 0 | 0 | 0 | 0 | 0 | 0 |
| 386 | 1 | 0 | 0 | 0 | 0 | 0 | 0.6 | 0 | 0 | 0 | 0 | 0 | 0 | 0 | 0 | 0 | 0 | 0 | 0 | 0 | 0 |
| 387 | 0 | 0 | 0 | 0 | 0 | 0 | 0 | 0 | 0 | 0.6 | 0 | 0 | 0 | 0 | 0 | 0 | 0 | 0 | 0 | 0 | 0 |
| 388 | 0.6 | 0 | 0 | 0 | 0 | 0 | 0 | 0 | 0 | 0 | 0 | 0 | 0 | 0 | 0 | 0 | 0 | 0 | 0 | 0 | 0 |
| 389 | 0 | 0.6 | 0 | 0 | 0 | 0.6 | 1 | 0 | 0 | 0 | 0 | 1 | 0 | 0 | 0 | 0 | 0 | 0 | 0 | 0 | 0 |
| 390 | 0 | 0 | 0 | 0 | 1 | 0 | 0 | 0 | 0 | 0 | 0 | 0 | 0 | 0 | 0 | 0 | 1 | 0 | 0 | 0.6 | 0 |
| 391 | 0 | 0 | 0 | 0 | 0 | 0 | 0 | 0 | 0 | 1 | 0.6 | 0 | 0 | 0 | 0 | 0 | 0 | 0 | 0 | 1 | 0 |
| 392 | 0 | 1 | 0 | 0 | 0 | 0 | 0 | 0 | 0 | 0 | 0 | 0.6 | 0 | 0 | 0 | 0 | 0 | 0 | 0 | 0 | 0 |
| 393 | 0 | 0 | 0 | 0.6 | 0 | 0 | 1 | 0 | 0 | 0 | 0 | 0 | 0 | 0 | 0 | 1 | 0 | 0 | 0 | 0 | 0 |
| 394 | 0 | 0 | 0 | 0 | 0 | 0 | 0 | 0 | 0 | 0 | 0 | 0 | 0 | 0 | 0 | 0 | 0 | 0 | 0 | 0.6 | 0 |
| 395 | 0 | 0 | 0 | 0 | 0 | 0 | 0 | 0 | 0 | 0.6 | 0 | 0 | 1 | 0 | 0 | 0 | 0 | 0 | 0 | 1 | 0 |
| 396 | 0 | 0 | 1 | 0 | 1 | 0 | 0 | 1 | 0 | 0 | 0 | 0 | 0 | 1 | 0 | 0.6 | 1 | 0 | 0 | 1 | 0 |
| 397 | 0 | 0 | 0 | 0 | 0 | 0 | 1 | 0.6 | 0 | 0 | 0 | 0 | 0 | 0 | 0 | 0 | 0 | 0 | 0 | 0 | 0 |
| 398 | 1 | 0 | 0 | 0 | 0 | 0 | 0 | 0 | 0 | 0 | 0 | 1 | 0 | 0 | 0.6 | 0 | 0 | 0 | 0 | 0 | 0 |
| 399 | 0 | 0 | 0 | 0 | 0 | 0 | 0 | 0 | 0 | 1 | 1 | 0 | 0 | 0 | 0 | 0 | 0.6 | 0 | 0 | 0 | 0 |
| 400 | 0 | 0 | 0 | 0 | 0 | 0 | 0 | 0.6 | 0 | 0 | 0 | 0 | 0 | 0 | 0 | 0 | 0 | 0 | 0 | 0 | 0 |
| 401 | 0 | 0 | 0 | 0 | 0 | 1 | 0.6 | 0 | 0 | 0 | 0 | 0 | 0 | 0 | 0 | 0 | 0 | 0 | 0 | 0 | 0 |
| 402 | 0 | 0 | 1 | 0 | 0 | 0 | 1 | 0 | 0 | 0.6 | 0 | 1 | 0 | 0 | 0 | 0 | 0 | 0 | 0 | 0 | 0 |
| 403 | 0 | 0 | 0 | 0 | 0 | 0 | 0 | 0 | 0 | 0 | 0.6 | 0 | 0 | 0 | 0 | 0 | 0 | 0 | 0 | 0 | 0 |
| 404 | 0 | 0.6 | 0 | 0 | 0 | 0 | 0 | 0 | 0 | 0 | 0 | 0 | 0 | 0 | 0 | 0 | 0 | 0 | 0 | 0 | 0 |
| 405 | 0.6 | 1 | 0 | 0 | 0 | 0 | 0 | 0 | 1 | 0 | 0 | 1 | 0 | 0 | 0 | 0 | 0 | 0 | 0 | 0 | 0 |
| 406 | 0 | 0 | 1 | 0 | 0 | 0 | 0 | 0 | 0 | 0 | 0 | 0.6 | 0 | 0 | 0 | 0 | 0 | 0 | 0 | 0 | 0 |
| 407 | 0 | 0 | 0 | 0 | 0 | 0 | 0 | 0 | 0 | 0 | 0 | 0 | 0 | 0 | 0 | 0 | 0 | 0 | 0 | 0.6 | 0 |
| 408 | 1 | 0.6 | 0 | 0 | 0 | 0 | 0 | 0 | 0 | 0 | 0 | 1 | 0 | 0 | 0 | 0 | 0 | 0 | 0 | 0 | 0 |
| 409 | 0 | 0 | 0 | 0.6 | 0 | 0 | 1 | 0 | 0 | 0 | 0 | 0 | 0 | 0 | 0 | 0 | 0 | 0 | 0 | 0 | 0 |
| 410 | 0 | 0 | 0 | 0 | 0 | 0 | 0 | 0 | 0 | 0.6 | 1 | 0 | 0 | 0 | 0 | 0 | 0 | 0 | 0 | 0 | 0 |
| 411 | 1 | 0 | 0 | 0 | 0 | 0 | 0 | 1 | 0 | 0 | 0 | 0 | 0 | 0 | 0 | 0.6 | 0 | 0 | 0 | 0 | 0 |
| 412 | 0.6 | 1 | 0 | 0 | 0 | 0 | 1 | 0 | 0 | 0 | 1 | 0.6 | 0 | 0 | 0 | 0 | 1 | 0 | 0 | 0 | 0 |
| 413 | 0 | 0.6 | 1 | 0 | 0 | 0 | 0 | 0 | 0 | 0 | 0 | 1 | 0 | 0 | 0 | 0 | 0 | 0 | 0 | 0 | 0 |
| 414 | 0 | 0 | 0 | 0 | 0 | 0 | 0 | 0 | 0 | 0 | 0.6 | 0 | 0 | 0 | 0 | 0 | 0 | 1 | 0 | 0 | 0 |
| 415 | 0 | 0.6 | 0 | 0 | 0 | 0 | 0 | 0 | 0 | 0 | 0 | 1 | 0 | 0 | 0 | 0 | 0 | 0 | 0 | 0 | 0 |
| 416 | 0.6 | 1 | 0 | 0 | 0 | 0 | 1 | 0 | 0 | 0 | 1 | 0 | 0 | 0 | 0 | 1 | 0 | 0 | 0 | 0 | 0 |
| 417 | 1 | 0.6 | 0 | 0 | 0 | 0 | 0 | 0 | 0 | 1 | 0 | 1 | 0 | 0 | 0 | 0 | 1 | 0 | 0 | 0 | 0 |
| 418 | 0 | 0.6 | 0 | 0 | 0 | 0 | 0 | 0 | 0 | 0 | 0 | 0 | 0 | 0 | 0 | 0 | 0 | 0 | 0 | 0 | 0 |
| 419 | 0 | 0 | 1 | 1 | 0 | 0 | 0.6 | 1 | 0 | 0 | 0 | 1 | 0 | 0 | 0 | 0 | 0 | 0 | 0 | 0 | 0 |
| 420 | 0 | 0 | 0 | 0 | 0 | 0 | 0.6 | 0 | 0 | 0 | 0 | 0 | 0 | 0 | 1 | 0 | 0 | 0 | 0 | 1 | 0 |
| 421 | 0 | 0 | 0 | 0 | 0 | 0 | 0.6 | 0 | 0 | 0 | 0 | 0 | 0 | 0 | 0 | 0 | 0 | 0 | 0 | 0 | 0 |
| 422 | 0 | 0 | 0 | 0 | 0 | 0 | 0 | 0 | 0 | 0 | 0 | 0 | 0.6 | 0 | 0 | 0 | 0 | 0 | 0 | 0 | 0 |
| 423 | 0 | 0 | 0.6 | 1 | 0 | 1 | 0 | 1 | 0 | 0 | 0 | 0 | 0 | 0 | 0 | 0 | 1 | 0 | 0 | 0 | 0 |
| 424 | 0.6 | 0 | 0 | 0 | 0 | 0 | 0 | 0 | 0 | 1 | 0 | 1 | 0 | 0 | 0 | 0 | 0 | 0 | 0 | 0 | 0 |
| 425 | 0.6 | 0 | 0 | 0 | 0 | 0 | 0 | 0 | 0 | 0 | 1 | 0 | 0 | 0 | 0 | 0 | 0 | 0 | 0 | 0 | 0 |
| 426 | 0.6 | 0 | 0 | 0 | 0 | 0 | 0 | 0 | 0 | 0 | 0 | 0 | 1 | 0 | 0 | 0 | 0 | 0 | 0 | 1 | 0 |
| 427 | 0 | 0 | 0 | 0 | 0 | 0 | 0.6 | 0 | 0 | 0 | 1 | 0 | 0 | 0 | 0 | 0 | 0 | 0 | 0 | 0 | 0 |
| 428 | 1 | 0 | 0 | 0 | 0 | 0 | 0.6 | 0 | 0 | 0 | 0 | 0 | 0 | 0 | 0 | 0 | 0 | 0 | 0 | 0 | 0 |
| 429 | 0 | 0 | 0 | 0 | 0 | 0 | 0 | 0 | 0 | 0 | 0.6 | 0 | 0 | 1 | 0 | 0 | 0 | 0 | 1 | 0 | 0 |
| 430 | 0 | 0 | 0 | 0 | 0 | 0 | 0 | 0 | 0 | 0.6 | 1 | 1 | 1 | 0 | 0 | 0 | 0 | 0 | 0 | 0 | 0 |
| 431 | 1 | 1 | 0 | 0 | 0 | 0.6 | 0 | 0 | 0 | 0 | 1 | 1 | 0 | 0 | 0 | 1 | 0 | 0 | 0 | 0 | 0 |
| 432 | 0 | 0 | 0 | 0 | 0 | 0 | 0 | 0 | 0 | 0 | 0.6 | 0 | 0 | 0 | 0 | 0 | 0 | 0 | 0 | 0 | 0 |
| 433 | 0 | 0 | 0 | 0 | 0.6 | 0 | 0 | 1 | 1 | 0 | 0 | 0 | 0 | 0 | 0 | 0 | 0 | 0 | 0 | 0 | 0 |
| 434 | 0 | 0.6 | 0 | 0 | 0 | 1 | 0 | 0 | 1 | 0 | 0 | 1 | 0 | 1 | 1 | 0 | 1 | 0 | 1 | 1 | 0 |
| 435 | 0 | 0 | 0.6 | 0 | 0 | 0 | 0 | 0 | 1 | 0 | 0 | 1 | 0 | 0 | 0 | 0 | 0 | 0 | 0 | 0 | 0 |
| 436 | 0 | 0.6 | 0 | 0 | 0 | 0 | 0 | 0 | 0 | 0 | 1 | 0 | 0 | 0 | 0 | 0 | 0 | 0 | 0 | 0 | 0 |
| 437 | 1 | 1 | 0.6 | 0 | 0 | 0 | 0 | 0 | 0 | 0 | 1 | 0 | 0 | 0 | 0 | 1 | 0 | 0 | 0 | 0 | 0 |
| 438 | 0.6 | 0 | 0 | 0 | 0 | 0 | 0 | 0 | 0 | 0 | 0 | 0 | 0 | 0 | 0 | 0 | 0 | 0 | 0 | 0 | 0 |
| 439 | 1 | 0 | 0 | 0 | 0 | 0 | 0 | 0 | 0 | 0 | 1 | 1 | 0 | 1 | 0 | 1 | 1 | 0 | 0.6 | 0 | 0 |
| 440 | 0 | 0 | 1 | 0 | 0 | 0 | 0 | 0 | 0 | 0 | 0 | 0.6 | 0 | 0 | 0 | 0 | 0 | 0 | 0 | 1 | 0 |

### Example 15: Computational Design of ADP-Glucose Dependent B12GTs

[0099] Improved B12GTs were designed by using the designed B12GTs from Example 12 and Example 13 as starting scaffolds for further design rounds. Computational design methods were used to improve the stability and expression of seven B12GTs from Example 12 and Example 13. One hundred thirty-four computational designs were chosen for experimental validation (SEQ ID NOs: 1333-1466). Expression plasmids for the computational designs were built as in Example 1. Each B12GT variant was expressed and purified as in Example 2. Each B12GT variant was assayed in a one-pot reaction with a SuSy variant of pA21838. The purified B12GT and SuSy were reacted with 100 mg/mL RA50, 250 mM Sucrose, and 0.5 mM ADP in 50 mM pH 6 phosphate buffer and 50 mM NaCl for 24 hours at 60° C. Product rebaudiosides were monitored by LCMS similar to Example 3. Several designed enzymes expressed well and were active for Reb A to Reb D conversion (Table 18).

TABLE 18
Computational Designs of Improved B12GTs

| ID | % Conversion | Purified Conc (uM) |
|---|---|---|
| pA35535 | 42.8 | 38.1 |
| pA35532 | 38.9 | 27.1 |
| pA35534 | 37.9 | 44.6 |
| pA35594 | 36 | 12.7 |
| pA35536 | 35.5 | 65.5 |
| pA35568 | 33.5 | 25 |
| pA35531 | 33 | 20.7 |
| pA35574 | 32.5 | 42.4 |
| pA35526 | 31.8 | 13.6 |
| pA35565 | 31.8 | 28.5 |
| pA35576 | 30 | 13.5 |
| pA35564 | 28.9 | 23.8 |
| pA35575 | 25.6 | 22.3 |
| pA35525 | 22.7 | 10.5 |
| pA35511 | 22.4 | 42.9 |
| pA35562 | 20.6 | 43.2 |
| pA35508 | 19.2 | 92.7 |
| pA35561 | 18.3 | 37.3 |
| pA35503 | 18.1 | 86.4 |
| pA35533 | 17.6 | 56.9 |
| pA35522 | 17.1 | 13.2 |
| pA35530 | 16.9 | 38.6 |
| pA35613 | 16.5 | 11.8 |
| pA35515 | 13.4 | 66.4 |
| pA35507 | 12.1 | 76.3 |
| pA35510 | 11.9 | 33.2 |
| pA35516 | 11.8 | 57.7 |
| pA35506 | 11.5 | 63.3 |
| pA35513 | 11.1 | 48.3 |
| pA35514 | 9.8 | 65.8 |
| pA35592 | 8.5 | 18.4 |
| pA35563 | 8.2 | 32.9 |
| pA35593 | 8.1 | 6 |
| pA35567 | 7.2 | 49.1 |
| pA35614 | 6.5 | 9 |
| pA35501 | 6.3 | 69.1 |
| pA35496 | 6.1 | 36.6 |
| pA35598 | 5.9 | 8.4 |
| pA35502 | 5.9 | 69.7 |
| pA35493 | 5.6 | 40.5 |
| pA35570 | 5.6 | 25.5 |
| pA35497 | 5.4 | 27.3 |
| pA35509 | 5.4 | 53.2 |
| pA35495 | 5.4 | 40.9 |
| pA35499 | 5.2 | 67.2 |
| pA35517 | 5.1 | 6.4 |
| pA35569 | 5 | 47 |
| pA35505 | 4.8 | 97.3 |
| pA35528 | 4.7 | 14.1 |
| pA35490 | 4.6 | 68.8 |
| pA35603 | 4.5 | 10.1 |
| pA35487 | 4.4 | 44.9 |
| pA35498 | 4.4 | 31.1 |
| pA35584 | 4.3 | 17.6 |
| pA35566 | 4.3 | 47.6 |
| pA35492 | 4.2 | 55 |
| pA35527 | 4.1 | 11.8 |
| pA35518 | 3.9 | 5.7 |
| pA35520 | 3.8 | 2.6 |
| pA35529 | 3.7 | 13.5 |
| pA35504 | 3.6 | 50.1 |
| pA35484 | 3.6 | 13.9 |
| pA35489 | 3.6 | 36.2 |
| pA35548 | 3.6 | 5.4 |
| pA35571 | 3.5 | 27.6 |
| pA35524 | 3.5 | 3.1 |
| pA35488 | 3.5 | 36 |
| pA35483 | 3.5 | 14.8 |
| pA35543 | 3.5 | 2.9 |
| pA35541 | 3.5 | 3.6 |
| pA35482 | 3.5 | 16.2 |
| pA35500 | 3.4 | 46.5 |
| pA35546 | 3.4 | 2.2 |
| pA35545 | 3.4 | 4.1 |
| pA35494 | 3.4 | 44.3 |
| pA35519 | 3.4 | 3.1 |
| pA35491 | 3.3 | 44.5 |
| pA35604 | 3.3 | 6.9 |
| pA35521 | 3.3 | 4.4 |
| pA35542 | 3.3 | 3.9 |
| pA35486 | 3.2 | 31.2 |
| pA35547 | 3.2 | 2.1 |
| pA35544 | 3.1 | 4.2 |
| pA35523 | 3.1 | 1.8 |
| pA35481 | 3.1 | 18.4 |
| pA35537 | 3 | 0.8 |
| pA35485 | 3 | 31.3 |
| pA35538 | 3 | 2.1 |
| pA35540 | 2.8 | 3.2 |
| pA35559 | 2.7 | 14.6 |
| pA35539 | 2.7 | 3.9 |
| pA35557 | 2.7 | 25 |
| pA35581 | 1.5 | 24.3 |
| pA35560 | 1.4 | 40.5 |
| pA35512 | 1.1 | 24 |
| pA35588 | 1.1 | 16.5 |
| pA35580 | 1.1 | 6.8 |
| pA35589 | 0.9 | 2.8 |
| pA35591 | 0.8 | 16.6 |
| pA35587 | 0.6 | 10 |
| pA35556 | 0.5 | 16.5 |
| pA35602 | 0.4 | 3.8 |
| pA35586 | 0.4 | 13.2 |
| pA35590 | 0.4 | 16.2 |
| pA35553 | 0.4 | 9.9 |
| pA35555 | 0.2 | 15.9 |
| pA35558 | 0.2 | 30.4 |

### Example 16: Computational Design of ADP-Glucose Dependent B12GTs

[0100] Structural models of a third B12GT variant of pA28422 were generated and used as the starting point for computational designs. Computational designs were conducted to improve the stability and expression of the B12GT. Fifty-three computational designs were chosen for experimental validation (SEQ ID NOs: 830-882). Expression plasmids for the computational designs were built as in Example 1. Each B12GT variant was expressed and purified as in Example 2. Each B12GT variant was assayed in a one-pot reaction with a SuSy variant of pA21838. The purified B12GT and SuSy were reacted with 10 mg/mL RA50, 100 mM Sucrose, and 0.5 mM ADP in 50 mM pH 6 phosphate buffer, 3 mM MgCl₂ and 50 mM NaCl for 24 hours at 60° C. Product rebaudiosides were monitored by LCMS similar to Example 3. Several designed enzymes expressed well and were active for Reb A to Reb D conversion (Table 19).

TABLE 19
Top B12GT Computational Designs

| ID | % Conversion | Purified Conc (uM) |
|---|---|---|
| pA29846 | 21 | 11.3 |
| pA29856 | 20 | 27.6 |
| pA29850 | 19.6 | 28.9 |
| pA29870 | 13.6 | 18.2 |
| pA29845 | 13.5 | 20.1 |
| pA29823 | 10.6 | 0.6 |
| pA29847 | 9.7 | 12.1 |
| pA29822 | 8.7 | 20.7 |
| pA29837 | 8.4 | −3.1 |
| pA29848 | 7.6 | 54 |
| pA29829 | 7 | 9.1 |
| pA29821 | 6.4 | 5.7 |
| pA29828 | 6.1 | 3.8 |
| pA29859 | 5.3 | 12.6 |
| pA29853 | 4.7 | 29.8 |
| pA29824 | 4.3 | 10.5 |
| pA29854 | 3.9 | 16.9 |
| pA29852 | 3.7 | |
| pA29836 | 3.4 | 0.5 |
| pA29839 | 3.1 | 2 |
| pA29864 | 2.9 | 75.3 |
| pA29860 | 2.8 | 44.5 |
| pA29831 | 0.7 | 20.3 |

### Example 17: Computational Design of ADP Dependent Sucrose Synthases

[0101] Structural models of two SuSy variants of pA21838 were generated and used as the starting point for computational designs. The design strategies used to design ADPG-dependent B12GTs were used to design improved ADP dependent sucrose synthases. Two hundred and fifty-six computational designs were chosen for experimental validation (SEQ ID NOs: 925-1180). Expression plasmids for the computational designs were built as in Example 4. Each SuSy variant was expressed and purified as in Example 5. Each SuSy variant was assayed in a one-pot reaction with a B12GT variant of pA28422. The purified B12GT and SuSy were reacted with 100 mg/mL RA50, 250 mM Sucrose, and 0.5 mM ADP in 50 mM pH 6 phosphate buffer, 3 mM MgCl₂ and 50 mM NaCl for 24 hours at 60° C. Product rebaudiosides were monitored by LCMS similar to Example 3. The relative expression and Reb A to Reb D conversion of the designed enzymes, SEQ ID: 925-1048, are shown in Table 20. The relative expression and Reb A to Reb D conversion of the designed enzymes, SEQ ID: 1049-1104, are shown in Table 21. The top hits from the previous two experiments were re-evaluated with more relevant protein concentrations (Table 22). Finally, the relative expression and Reb A to Reb D conversion of the designed enzymes, SEQ ID: 1105-1180 are shown in Table 23.

TABLE 20
Top SuSy Computational Designs

| ID | % Conversion | Purified Conc (uM) |
|---|---|---|
| pA32819 | 11.9 | 15.5 |
| pA32719 | 11.7 | 22.2 |
| pA32712 | 11 | 13.6 |
| pA32667 | 10.5 | 22.7 |
| pA32602 | 9.9 | 19 |
| pA32854 | 9.9 | 26.9 |
| pA32924 | 9.9 | 18 |
| pA32858 | 9.6 | 30.2 |
| pA32732 | 9.6 | 31.1 |
| pA32652 | 9.6 | 23.5 |
| pA32582 | 9.5 | 32.3 |
| pA32692 | 9.5 | 35.4 |
| pA32657 | 9.2 | 13.2 |
| pA32734 | 9.2 | 26.3 |
| pA32821 | 9.1 | 25.3 |
| pA32704 | 9.1 | 20.9 |
| pA32601 | 9 | 15 |
| pA32706 | 8.8 | 28 |
| pA32721 | 8.6 | 20.6 |
| pA32614 | 8.5 | 23.8 |
| pA32684 | 8.5 | 26.7 |
| pA32736 | 8.3 | 33.2 |
| pA32609 | 8.3 | 30.3 |
| pA32926 | 8.3 | 19.5 |
| pA32639 | 8.2 | 13.1 |
| pA32655 | 8.1 | 64.4 |
| pA32696 | 8.1 | 30.3 |
| pA32855 | 8 | 30.2 |
| pA32704 | 7.9 | 19.4 |
| pA32820 | 7.9 | 20.1 |
| pA32651 | 7.9 | 8.4 |
| pA32819 | 7.7 | 10.6 |
| pA32697 | 7.7 | 11.2 |
| pA32602 | 7.6 | 19.4 |
| pA32723 | 7.5 | 59 |
| pA32625 | 7.5 | 27.1 |
| pA32678 | 7.4 | 51.5 |
| pA32622 | 7.3 | 15 |
| pA32731 | 7 | 5.4 |
| pA32629 | 6.9 | 11.8 |
| pA32700 | 6.7 | 24.4 |
| pA32608 | 6.6 | 26.4 |
| pA32708 | 6.4 | 9.3 |
| pA32686 | 6.2 | 15 |
| pA32698 | 6 | 28.6 |
| pA32589 | 5.9 | 35.5 |
| pA32680 | 5.8 | 22.3 |
| pA32586 | 5.7 | 22.8 |
| pA32700 | 5.7 | 28.6 |
| pA32606 | 5.6 | 24.6 |
| pA32620 | 5.6 | 15.6 |
| pA32596 | 5.5 | 54.2 |
| pA32616 | 5.4 | 39 |
| pA32696 | 5.4 | 66.8 |
| pA32600 | 4.8 | 29.4 |
| pA32669 | 4.7 | 56.5 |
| pA32682 | 4.6 | 33.2 |
| pA32845 | 4.2 | 17.1 |
| pA32868 | 4.1 | 9.6 |
| pA32715 | 4.1 | 27.5 |
| pA32650 | 3.8 | 29.7 |
| pA32620 | 3.6 | 16.4 |
| pA32690 | 3.6 | 15 |
| pA32716 | 3.5 | 37.9 |
| pA32702 | 3.5 | 13.2 |
| pA32863 | 3.4 | 10 |
| pA32605 | 3.2 | 29.1 |
| pA32595 | 2.9 | 41.2 |
| pA32847 | 2.6 | 8.8 |
| pA32594 | 2.5 | 23.5 |
| pA32670 | 2.4 | 24.7 |
| pA32675 | 2.2 | 28.8 |
| pA32880 | 2.1 | 11.5 |
| pA32837 | 2.1 | 19.6 |
| pA32702 | 2.1 | 12.4 |
| pA32688 | 2 | 22.8 |
| pA32591 | 1.9 | 47.5 |
| pA32662 | 1.9 | 23.6 |
| pA32701 | 1.7 | 21.9 |
| pA32758 | 1.5 | 19.7 |
| pA32603 | 1.5 | 57.3 |
| pA32671 | 1.2 | 15.6 |
| pA32671 | 1.1 | 22.4 |
| pA32842 | 0.9 | 5.5 |
| pA32781 | 0.9 | 10 |
| pA32934 | 0.9 | 15.3 |
| pA32831 | 0.9 | 7.6 |
| pA32793 | 0.8 | 7.4 |
| pA32662 | 0.8 | 15.2 |
| pA32701 | 0.8 | 23.3 |
| pA32717 | 0.8 | 30.7 |
| pA32748 | 0.8 | 28.3 |
| pA32672 | 0.7 | 32.3 |
| pA32826 | 0.7 | 2 |
| pA32816 | 0.7 | 13.6 |
| pA32664 | 0.7 | 9.7 |
| pA32754 | 0.6 | 22.6 |
| pA32666 | 0.6 | 46 |
| pA32770 | 0.5 | 11.7 |
| pA32779 | 0.5 | 8.3 |
| pA32844 | 0.5 | 6.4 |
| pA32665 | 0.4 | 21 |
| pA32659 | 0.4 | 25.1 |
| pA32799 | 0.3 | 33.5 |
| pA32790 | 0.2 | 22.6 |
| pA32787 | 0.2 | 14.3 |
| pA32623 | 0.2 | 13.8 |
| pA32866 | 0.2 | 29.3 |
| pA32767 | 0.2 | 23 |
| pA32828 | 0.2 | 9 |
| pA32876 | 0.2 | 5.4 |
| pA32797 | 0.1 | 9.6 |

TABLE 21
Top SuSy Computational Designs

| ID | % Conversion | Purified Conc (uM) |
|---|---|---|
| pA32930 | 89.9 | 2.7 |
| pA32894 | 87.3 | 4.8 |
| pA32892 | 86 | 9.6 |
| pA32729 | 83.3 | 3.1 |
| pA32732 | 80.2 | 3.3 |
| pA32869 | 78.3 | 11.8 |
| pA32734 | 77.3 | 3.4 |
| pA32646 | 69.8 | 5.4 |
| pA32735 | 53.9 | 4 |
| pA32652 | 49.8 | 2.8 |
| pA32923 | 47.8 | 5.5 |
| pA32724 | 40.5 | 2.8 |
| pA32722 | 36.8 | 1.3 |
| pA32723 | 36.4 | 2.7 |
| pA32727 | 30.5 | 1.8 |
| pA32653 | 26.1 | 3.4 |
| pA32888 | 25.3 | 3.9 |
| pA32650 | 24.3 | 3.1 |
| pA32868 | 21.7 | 2.6 |
| pA32632 | 20.2 | 3 |
| pA32634 | 19.2 | 2.7 |
| pA32922 | 18 | 1.7 |
| pA32765 | 12.3 | 2.8 |
| pA32895 | 12.3 | 2.8 |
| pA32884 | 10.9 | 4.3 |
| pA32880 | 10.6 | 3 |
| pA32638 | 10.2 | 3.3 |
| pA32751 | 10.2 | 1.2 |
| pA32903 | 9.5 | 3.3 |
| pA32769 | 8.9 | 1.6 |
| pA32871 | 8.5 | 2.8 |
| pA32770 | 7.9 | 1.3 |
| pA32780 | 7.9 | 1.9 |
| pA32754 | 7.2 | 1.6 |
| pA32752 | 6.6 | 3.8 |
| pA32760 | 6.4 | 1.5 |
| pA32775 | 6.3 | 2.5 |
| pA32904 | 6.2 | 3.2 |
| pA32761 | 6.2 | 2.2 |
| pA32793 | 6 | 2.1 |
| pA32881 | 5.7 | 1.4 |
| pA32902 | 5.5 | 3.2 |
| pA32779 | 5.5 | 1.7 |
| pA32623 | 5.4 | 0.8 |
| pA32918 | 5.2 | 4.8 |
| pA32758 | 5.2 | 1.3 |
| pA32746 | 5 | 3.8 |
| pA32750 | 4.6 | 2.1 |
| pA32882 | 4.6 | 1.9 |
| pA32747 | 4.5 | 5.1 |
| pA32876 | 4.2 | 1.2 |
| pA32782 | 4.1 | 1.4 |
| pA32767 | 4 | 2.2 |
| pA32785 | 3.9 | 2.1 |
| pA32749 | 3.9 | 3.1 |
| pA32914 | 3.7 | 2.2 |
| pA32875 | 3.7 | 2.1 |
| pA32917 | 3.4 | 2 |
| pA32763 | 3.2 | 2.1 |
| pA32737 | 3.2 | 1.8 |
| pA32886 | 3.2 | 2.4 |
| pA32757 | 3.2 | 2.3 |
| pA32743 | 2.8 | 3.6 |
| pA32932 | 2.8 | 2.8 |
| pA32885 | 2.8 | 2.6 |
| pA32865 | 2.7 | 1.3 |
| pA32791 | 2.7 | 2.4 |
| pA32913 | 2.6 | 2.3 |
| pA32742 | 2.5 | 1.4 |
| pA32879 | 2.4 | 1 |
| pA32738 | 2.1 | 3.7 |
| pA32916 | 1.9 | 0.9 |
| pA32912 | 1.7 | 0.8 |
| pA32906 | 1.7 | 3.1 |

TABLE 22
Top SuSy Computational Designs

| ID | % Conversion | Purified Conc (uM) |
|---|---|---|
| pA32821 | 57.6 | 39.4 |
| pA32888 | 54.8 | 40.1 |
| pA32854 | 52.3 | 28.7 |
| pA32858 | 51.8 | 55.2 |
| pA32855 | 47.6 | 28.8 |
| pA32868 | 46.4 | 35.4 |
| pA32924 | 45.7 | 25.2 |
| pA32930 | 45.7 | 44 |
| pA32926 | 42.6 | 31.7 |
| pA32692 | 41.7 | 28.5 |
| pA32684 | 40.8 | 31.1 |
| pA32819 | 40.7 | 19.5 |
| pA32820 | 40 | 24.7 |
| pA32731 | 37.9 | 67.2 |
| pA32655 | 37.5 | 39.4 |
| pA32894 | 37 | 48.2 |
| pA32646 | 36.9 | 28.8 |
| pA32892 | 35.9 | 50.8 |
| pA32629 | 35.4 | 12.5 |
| pA32625 | 34.5 | 11.4 |
| pA32869 | 30.9 | 54.8 |
| pA32732 | 30.7 | 83.5 |
| pA32923 | 28.7 | 40.4 |
| pA32706 | 28.7 | 41.3 |
| pA32719 | 26.9 | 47.4 |
| pA32729 | 26.6 | 87.8 |
| pA32697 | 26.4 | 13.5 |
| pA32652 | 26.3 | 37.2 |
| pA32704 | 23.9 | 29.1 |
| pA32696 | 23.3 | 56.5 |
| pA32712 | 22.1 | 22.6 |
| pA32650 | 21 | 34.9 |
| pA32639 | 19.8 | 14.7 |
| pA32722 | 18.5 | 44.1 |
| pA32734 | 18.1 | 66 |
| pA32724 | 17.7 | 25.7 |
| pA32727 | 17.7 | 27 |
| pA32922 | 17.3 | 25.2 |
| pA32715 | 17.1 | 31.7 |
| pA32845 | 16.9 | 7.4 |
| pA32651 | 16.8 | 15.4 |
| pA32620 | 16.1 | 19.3 |
| pA32602 | 16 | 37.9 |
| pA32735 | 15.5 | 76.1 |
| pA32667 | 15 | 44.6 |
| pA32736 | 14 | 59.7 |
| pA32622 | 14 | 29.6 |
| pA32708 | 13.7 | 9.7 |
| pA32721 | 13.4 | 49.5 |
| pA32723 | 12.8 | 53.7 |
| pA32698 | 11.2 | 23.8 |
| pA32680 | 10.5 | 18.6 |
| pA32601 | 10.5 | 44.7 |
| pA32586 | 8 | 45.5 |
| pA32682 | 7.2 | 50.4 |
| pA32582 | 7.1 | 55.4 |
| pA32609 | 6.7 | 49.5 |
| pA32600 | 6.6 | 23.1 |
| pA32608 | 6.2 | 41.2 |
| pA32700 | 6 | 47.4 |
| pA32686 | 5.7 | 23.3 |
| pA32669 | 5.5 | 52.3 |
| pA32606 | 5.5 | 33.4 |
| pA32589 | 4.9 | 74.3 |
| pA32616 | 4.6 | 53.3 |
| pA32678 | 4 | 70.8 |
| pA32614 | 3.9 | 71 |
| pA32657 | 3.6 | 18.5 |
| pA32596 | 2.8 | 100.6 |

TABLE 23
Top SuSy Computational Designs

| ID | % Conversion | Purified Conc (uM) |
|---|---|---|
| pA32929 | 86.6 | 7.5 |
| pA32891 | 86.3 | 8.3 |
| pA32853 | 86.2 | 13.7 |
| pA32587 | 86 | 26.3 |
| pA32887 | 85 | 17 |
| pA32725 | 81.7 | 24.1 |
| pA32889 | 79.2 | 7.2 |
| pA32599 | 78.5 | 16.1 |
| pA32633 | 78 | 10.8 |
| pA32927 | 68.1 | 8.5 |
| pA32691 | 58.5 | 17.9 |
| pA32658 | 49.4 | 19.7 |
| pA32683 | 48.3 | 18.4 |
| pA32931 | 27.7 | 11.2 |
| pA32597 | 24.8 | 33 |
| pA32579 | 23.5 | 20.5 |
| pA32679 | 21.7 | 13.3 |
| pA32621 | 21.7 | 3.7 |
| pA32581 | 21.3 | 19.5 |
| pA32695 | 17.2 | 40.2 |
| pA32647 | 15.8 | 5.9 |
| pA32637 | 14.8 | 18.9 |
| pA32873 | 11 | 10.9 |
| pA32585 | 10.9 | 13.5 |
| pA32631 | 10.4 | 5.4 |
| pA32859 | 7.7 | 12.6 |
| pA32619 | 6.6 | 5.9 |
| pA32689 | 6.2 | 10.9 |
| pA32617 | 4.9 | 3.8 |
| pA32613 | 4.7 | 25.6 |
| pA32641 | 4 | 24 |
| pA32768 | 3.6 | 10.9 |
| pA32774 | 2.9 | 5.9 |
| pA32778 | 2.8 | 4.2 |
| pA32773 | 2.5 | 5.4 |
| pA32673 | 1.9 | 13.4 |
| pA32843 | 1.7 | 3.8 |
| pA32583 | 1.3 | 22.1 |
| pA32897 | 1.1 | 3.1 |
| pA32610 | 1 | 10.2 |
| pA32776 | 0.7 | 5.3 |
| pA32849 | 0.6 | 10.7 |
| pA32685 | 0.5 | 37.1 |
| pA32839 | 0.5 | 2.2 |

### Example 18: Representing Successful SuSy Designs with a PSSM

[0102] The successful SuSy designs from Example 17 were used to create a PSSM (Table 24). The PSSM is a concise way to represent the successful designs and related sequences. Sequences the have a PSSM score greater than 556 are considered related to the active computational designs described in Example 17. To score a sequence with the generated PSSM, it must first be aligned with the representative sequence pA21838 (Seq ID No: 885). For example, the following successful designs, pA32853, pA32891, pA32892, pA32929, have the following PSSM scores: 557.2, 558.1, 558.1, 557.8, while the wild-type SuSy pA21838, has a PSSM score of only 536.3.

TABLE 24
Position Specific Scoring Matrix (PSSM) of Successful SuSy Designs

| Seq | Amino Acid | | | | | | | | | | | | | | | | | | | | |
|---|---|---|---|---|---|---|---|---|---|---|---|---|---|---|---|---|---|---|---|---|---|
| Pos | A | R | N | D | C | Q | E | G | H | I | L | K | M | F | P | S | T | W | Y | V | — |
| 1 | 0 | 0 | 0 | 0 | 0 | 0 | 0 | 0 | 0 | 0 | 0 | 0 | 0.7 | 0 | 0 | 0 | 0 | 0 | 0 | 0 | 0 |
| 2 | 0 | 0 | 0 | 0 | 0 | 0 | 0 | 0 | 0 | 0.7 | 0 | 0 | 0 | 0 | 0 | 0 | 0 | 0 | 0 | 0 | 0 |
| 3 | 0 | 0 | 0 | 0 | 0 | 0 | 0.7 | 0 | 0 | 0 | 0 | 0 | 0 | 0 | 0 | 0 | 0 | 0 | 0 | 0 | 0 |
| 4 | 1 | 1 | 0 | 0 | 0 | 0 | 0.7 | 0 | 0 | 0 | 0 | 0 | 0 | 0 | 0 | 1 | 0 | 0 | 0 | 0.7 | 0 |
| 5 | 0 | 0 | 0 | 0 | 0 | 0 | 0 | 0 | 0 | 0 | 0.7 | 0 | 0 | 0 | 0 | 0 | 0 | 0 | 0 | 0 | 0 |
| 6 | 0 | 0.7 | 0 | 1 | 0 | 0 | 0 | 0 | 0 | 0 | 0 | 0 | 0 | 0 | 0 | 0 | 0 | 0 | 0 | 0 | 0 |
| 7 | 0 | 0 | 0 | 0 | 0 | 0.7 | 1 | 0 | 0 | 0 | 0 | 0 | 0 | 0 | 0 | 0 | 0 | 0 | 0 | 0 | 0 |
| 8 | 0 | 0 | 0 | 0 | 0 | 0.7 | 0 | 0 | 0 | 0 | 0 | 0 | 0 | 1 | 0 | 0 | 0 | 0 | 0 | 0 | 0 |
| 9 | 0 | 0 | 0 | 0 | 0 | 0 | 0 | 0 | 0 | 0 | 0.7 | 0 | 0 | 0 | 0 | 0 | 0 | 0 | 0 | 0 | 0 |
| 10 | 1 | 1 | 0 | 0 | 0 | 1 | 0 | 0 | 0 | 0 | 0.7 | 1 | 0 | 0 | 0 | 1 | 0 | 0 | 0 | 0 | 0 |
| 11 | 0 | 0 | 0 | 0.7 | 0 | 1 | 1 | 0 | 0 | 0 | 0 | 0 | 0 | 0 | 0 | 1 | 0 | 0 | 0 | 0 | 0 |
| 12 | 0 | 0 | 1 | 0 | 0 | 0 | 0 | 0 | 1 | 0 | 0 | 0 | 0 | 0 | 0 | 0.7 | 0 | 0 | 0 | 0 | 0 |
| 13 | 0 | 1 | 0 | 0 | 0 | 0 | 0 | 0 | 0 | 0 | 0 | 0 | 0 | 0 | 0.7 | 0 | 0 | 0 | 0 | 0 | 0 |
| 14 | 0 | 0.7 | 1 | 1 | 0 | 0 | 1 | 0 | 0 | 0 | 0 | 0 | 0 | 0 | 0 | 0 | 0 | 0 | 0 | 0 | 0 |
| 15 | 1 | 0 | 0 | 1 | 0 | 1 | 1 | 0 | 0 | 0 | 0 | 0 | 0 | 0 | 0 | 0.7 | 1 | 0 | 0 | 0 | 0 |
| 16 | 0 | 0 | 0 | 0 | 0 | 0 | 0 | 0 | 0 | 0 | 1 | 0 | 0 | 0 | 0 | 0 | 0 | 0.7 | 0 | 1 | 0 |
| 17 | 0 | 0.7 | 0 | 0 | 0 | 0 | 0 | 0 | 1 | 0 | 0 | 0 | 0 | 0 | 0 | 0 | 0 | 0 | 1 | 0 | 0 |
| 18 | 0.7 | 1 | 0 | 0 | 0 | 0 | 0 | 0 | 0 | 0 | 1 | 0 | 0 | 0 | 0 | 0 | 0 | 0 | 0 | 0 | 0 |
| 19 | 0 | 0 | 0 | 0 | 0 | 0 | 0 | 0 | 0 | 0 | 1 | 0 | 0 | 0.7 | 0 | 0 | 0 | 0 | 0 | 0 | 0 |
| 20 | 0 | 0 | 0 | 0 | 0 | 0 | 0 | 0 | 0 | 0 | 0.7 | 0 | 0 | 0 | 0 | 0 | 0 | 0 | 0 | 0 | 0 |
| 21 | 0 | 0.7 | 0 | 0 | 0 | 0 | 0 | 0 | 0 | 0 | 0 | 0 | 0 | 0 | 0 | 0 | 0 | 0 | 0 | 0 | 0 |
| 22 | 0 | 1 | 0 | 0 | 0 | 0 | 0 | 0 | 0.7 | 0 | 0 | 0 | 0 | 0 | 0 | 0 | 0 | 0 | 0 | 0 | 0 |
| 23 | 0 | 0 | 0 | 0 | 0 | 0 | 0 | 0 | 0 | 0 | 0.7 | 0 | 0 | 0 | 0 | 0 | 0 | 0 | 1 | 0 | 0 |
| 24 | 0 | 0 | 0 | 0 | 0 | 0 | 0 | 0 | 0 | 0 | 1 | 0 | 0 | 0 | 0 | 0 | 0 | 0 | 0 | 0.7 | 0 |
| 25 | 0.7 | 0 | 0 | 0 | 0 | 0 | 0 | 1 | 0 | 0 | 0 | 0 | 0 | 0 | 0 | 0 | 0 | 0 | 0 | 0 | 0 |
| 26 | 0 | 0 | 0 | 0 | 0 | 1 | 0 | 0 | 0 | 0 | 1 | 0 | 0 | 0 | 0 | 0.7 | 0 | 0 | 0 | 0 | 0 |
| 27 | 0 | 0 | 0 | 0 | 0 | 0.7 | 0 | 1 | 0 | 0 | 0 | 0 | 0 | 0 | 0 | 0 | 0 | 0 | 0 | 0 | 0 |
| 28 | 0 | 0.7 | 0 | 0 | 0 | 0 | 0 | 0 | 0 | 0 | 0 | 0 | 0 | 0 | 0 | 0 | 0 | 0 | 0 | 0 | 0 |
| 29 | 0 | 0 | 0 | 0.7 | 0 | 0 | 0 | 1 | 0 | 0 | 0 | 0 | 0 | 0 | 1 | 0 | 1 | 0 | 0 | 0 | 0 |
| 30 | 0 | 0 | 0 | 0 | 0 | 0 | 0 | 0 | 0 | 1 | 1 | 0 | 1 | 1 | 0 | 0.7 | 0 | 0 | 0 | 0 | 0 |
| 31 | 0 | 0 | 0 | 0 | 0 | 0 | 0 | 0 | 0 | 0 | 1 | 0 | 0 | 0 | 0 | 0 | 0 | 0.7 | 0 | 0 | 0 |
| 32 | 0 | 0 | 0 | 0 | 0 | 1 | 0 | 0 | 0 | 0 | 0.7 | 0 | 0 | 0 | 0 | 0 | 0 | 0 | 0 | 0 | 0 |
| 33 | 0 | 1 | 0 | 0 | 0 | 0 | 0 | 0 | 0.7 | 0 | 0 | 0 | 0 | 0 | 0 | 0 | 0 | 0 | 0 | 0 | 0 |
| 34 | 0 | 0 | 0 | 0 | 0 | 0 | 0 | 0 | 1 | 0 | 0 | 0 | 0 | 0 | 0 | 1 | 0.7 | 0 | 0 | 0 | 0 |
| 35 | 0 | 0 | 0 | 0.7 | 0 | 0 | 0 | 0 | 0 | 0 | 0 | 0 | 0 | 0 | 0 | 0 | 0 | 0 | 0 | 0 | 0 |
| 36 | 0 | 0 | 0 | 0 | 0 | 0 | 0 | 0 | 0 | 0 | 0.7 | 0 | 0 | 0 | 0 | 0 | 0 | 0 | 0 | 0 | 0 |
| 37 | 0 | 0 | 0 | 0 | 0 | 0.7 | 0 | 0 | 0 | 0 | 0 | 0 | 0 | 0 | 0 | 0 | 0 | 1 | 0 | 0 | 0 |
| 38 | 0 | 0.7 | 0 | 1 | 0 | 0 | 0 | 0 | 0.7 | 0 | 0 | 0 | 0 | 0 | 0 | 0 | 0 | 0 | 0 | 0 | 0 |
| 39 | 0.7 | 0 | 0 | 0 | 0 | 0 | 1 | 0 | 0 | 0 | 0 | 0 | 0 | 0 | 0 | 0 | 0 | 0 | 0 | 0 | 0 |
| 40 | 0 | 0 | 0 | 0 | 0.7 | 0 | 0 | 0 | 0 | 0 | 1 | 0 | 0 | 1 | 0 | 0 | 0 | 0 | 0 | 0 | 0 |
| 41 | 1 | 0 | 0 | 1 | 0 | 0 | 1 | 0 | 0 | 0 | 1 | 0.7 | 0 | 0 | 0 | 0 | 0 | 0 | 0 | 0 | 0 |
| 42 | 1 | 1 | 1 | 1 | 0 | 0 | 1 | 0 | 0 | 0 | 0 | 0 | 0 | 0 | 0 | 0 | 0.7 | 0 | 0 | 0 | 0 |
| 43 | 0 | 0 | 0 | 0 | 0 | 0 | 0 | 0 | 0 | 0 | 0 | 0 | 0 | 0.7 | 0 | 0 | 0 | 0 | 0 | 0 | 0 |
| 44 | 0 | 0.7 | 0 | 0 | 1 | 0 | 0 | 0 | 0 | 0 | 0 | 0 | 0 | 0 | 0 | 0 | 0 | 0 | 1 | 0 | 0 |
| 45 | 1 | 0 | 0 | 0 | 0 | 0 | 0.7 | 0 | 0 | 0 | 0 | 0 | 0 | 0 | 0 | 0 | 0 | 0 | 0 | 0 | 0 |
| 46 | 0 | 0 | 0 | 0 | 0 | 0.7 | 1 | 0 | 0 | 0 | 0 | 0 | 0 | 0 | 1 | 0 | 0 | 0 | 0 | 0 | 0 |
| 47 | 0 | 0 | 0 | 1 | 0 | 1 | 1 | 0 | 0 | 0 | 0 | 0 | 0 | 0 | 0.7 | 0 | 0 | 0 | 0 | 0 | 0 |
| 48 | 0 | 0 | 0 | 1 | 0 | 0 | 0 | 1 | 0 | 0 | 0 | 0 | 0 | 0 | 0.7 | 0 | 0 | 0 | 0 | 0 | 0 |
| 49 | 0 | 0 | 1 | 0 | 0 | 0 | 0.7 | 0 | 0 | 0 | 0 | 0 | 0 | 0 | 0 | 0 | 0 | 0 | 0 | 0 | 0 |
| 50 | 0 | 0 | 0 | 0 | 0 | 0 | 1 | 0.7 | 0 | 0 | 0 | 0 | 0 | 0 | 0 | 0 | 0 | 0 | 0 | 0 | 0 |
| 51 | 0 | 0 | 0 | 0 | 0 | 0 | 1 | 0 | 0 | 0 | 0 | 0 | 0 | 0 | 0 | 1 | 0 | 0 | 0.7 | 0 | 0 |
| 52 | 1 | 0 | 0 | 0 | 0 | 0 | 1 | 1 | 0 | 0 | 1 | 0 | 0 | 0 | 0.7 | 0 | 0 | 0 | 0 | 0 | 0 |
| 53 | 0 | 0 | 0 | 0 | 0 | 0 | 0.7 | 0 | 0 | 0 | 1 | 0 | 0 | 0 | 0 | 0 | 0 | 0 | 0 | 0 | 0 |
| 54 | 1 | 0 | 0 | 0.7 | 0 | 0 | 0 | 1 | 0 | 0 | 1 | 1 | 1 | 0 | 0 | 0 | 1 | 0 | 0 | 0 | 0 |
| 55 | 0 | 0 | 0 | 1 | 0 | 0 | 0 | 1 | 0 | 0.7 | 0 | 0 | 0 | 0 | 0 | 1 | 1 | 0 | 0 | 0 | 0 |
| 56 | 0 | 0 | 0 | 0 | 0 | 0 | 0 | 0.7 | 0 | 0 | 0 | 0 | 0 | 0 | 0 | 1 | 0 | 0 | 0 | 0 | 0 |
| 57 | 1 | 0 | 0 | 0 | 0 | 0 | 0 | 0 | 0 | 0 | 0 | 0 | 0 | 0 | 1 | 0 | 0 | 0.7 | 0 | 1 | 0 |
| 58 | 0 | 0 | 0 | 0 | 0 | 0 | 0 | 0 | 0 | 0 | 0.7 | 0 | 0 | 1 | 0 | 0 | 0 | 0 | 0 | 0 | 0 |
| 59 | 0.7 | 0 | 0 | 0 | 0 | 0 | 1 | 1 | 0 | 0 | 0 | 0 | 0 | 0 | 0 | 0 | 0 | 0 | 0 | 0 | 0 |
| 60 | 0 | 1 | 0 | 0.7 | 0 | 1 | 1 | 0 | 0 | 0 | 0 | 0 | 0 | 0 | 0 | 0 | 0 | 0 | 0 | 0 | 0 |
| 61 | 1 | 0 | 0 | 0 | 0 | 0 | 0 | 0 | 0 | 0 | 1 | 0 | 0 | 0.7 | 0 | 0 | 0 | 0 | 0 | 1 | 0 |
| 62 | 0 | 0 | 0 | 0 | 0 | 0 | 0 | 0 | 0 | 0.7 | 0 | 0 | 0 | 0 | 0 | 0 | 0 | 0 | 0 | 0.7 | 0 |
| 63 | 0.7 | 1 | 0 | 0 | 0 | 1 | 1 | 0 | 0 | 0 | 0 | 1 | 0 | 0 | 0 | 0 | 0 | 0 | 0 | 0 | 0 |
| 64 | 1 | 1 | 0 | 0 | 0 | 0 | 0 | 0 | 0.7 | 0 | 0 | 1 | 0 | 0 | 0 | 0 | 0 | 0 | 0 | 0 | 0 |
| 65 | 1 | 0 | 0 | 0 | 0.7 | 0 | 0 | 0 | 0 | 0 | 0 | 0 | 0 | 0 | 0 | 0 | 0.7 | 0 | 0 | 0 | 0 |
| 66 | 0 | 0 | 0 | 0 | 0 | 0.7 | 0 | 0 | 0 | 0 | 0 | 0 | 0 | 0 | 0 | 0 | 0 | 0 | 0 | 0 | 0 |
| 67 | 0 | 0 | 0 | 0 | 0 | 0 | 0.7 | 0 | 0 | 0 | 0 | 0 | 0 | 0 | 0 | 0 | 0 | 0 | 0 | 0 | 0 |
| 68 | 0.7 | 0 | 0 | 0 | 0 | 0 | 0 | 0 | 0 | 0 | 0 | 0 | 0 | 0 | 0 | 0 | 0 | 0 | 0 | 0 | 0 |
| 69 | 1 | 0 | 0 | 0 | 0 | 0 | 0 | 0 | 0 | 0.7 | 0 | 0 | 0 | 0 | 0 | 0 | 0 | 0 | 0 | 1 | 0 |
| 70 | 0 | 0 | 0 | 0 | 0 | 0 | 0 | 0 | 0 | 1 | 1 | 0 | 0 | 0.7 | 0 | 0 | 0 | 0 | 0 | 1 | 0 |
| 71 | 0 | 0.7 | 0 | 1 | 0 | 0 | 0 | 0 | 1 | 0 | 1 | 0 | 0 | 0 | 0 | 0 | 0 | 0 | 0 | 0 | 0 |
| 72 | 1 | 0 | 0 | 0.7 | 0 | 0 | 0 | 0 | 0 | 0 | 0 | 0 | 0 | 0 | 0 | 0 | 0 | 0 | 0 | 0 | 0 |
| 73 | 0 | 0 | 0 | 0 | 0 | 0 | 0 | 0 | 0 | 0 | 0 | 0 | 0 | 0 | 0.7 | 0 | 0 | 0 | 0 | 0 | 0 |
| 74 | 0 | 0 | 0 | 0 | 0 | 0 | 0 | 0 | 0 | 0 | 0 | 0 | 0 | 0 | 0 | 0 | 0 | 0.7 | 0 | 0 | 0 |
| 75 | 1 | 0 | 0 | 0 | 0 | 0 | 0 | 0 | 0 | 1 | 0 | 0 | 0.7 | 1 | 0 | 0 | 0 | 0 | 0 | 1 | 0 |
| 76 | 0 | 0 | 0 | 0 | 1 | 0 | 0 | 0 | 0 | 0 | 0 | 0 | 0 | 0 | 0 | 0 | 0 | 0 | 1 | 0.7 | 0 |
| 77 | 0 | 0 | 0 | 0 | 0 | 0 | 0 | 0 | 0 | 0 | 1 | 0 | 0 | 0.7 | 0 | 0 | 0 | 0 | 0 | 0 | 0 |
| 78 | 0.7 | 0 | 0 | 0 | 0 | 0 | 0 | 0 | 0 | 0 | 0 | 0 | 0 | 0 | 0 | 0 | 0 | 0 | 0 | 0 | 0 |
| 79 | 0 | 0 | 0 | 0 | 0 | 0 | 0 | 0 | 0 | 1 | 1 | 0 | 0 | 0 | 0 | 0 | 0 | 0.7 | 0 | 1 | 0 |
| 80 | 0 | 0.7 | 0 | 0 | 0 | 0 | 0 | 0 | 0 | 0 | 0 | 0 | 0 | 0 | 0 | 0 | 0 | 0 | 0 | 0 | 0 |
| 81 | 0 | 0 | 0 | 0 | 0 | 0 | 1 | 0 | 0 | 0 | 0.7 | 0 | 0 | 0 | 1 | 0 | 0 | 0 | 0 | 0 | 0 |
| 82 | 0 | 0.7 | 0 | 0 | 0 | 0 | 0 | 0 | 0 | 0 | 0 | 0 | 0 | 0 | 0 | 0 | 0 | 0 | 0 | 0 | 0 |
| 83 | 0 | 0 | 0 | 0 | 0 | 0 | 0 | 0 | 0 | 0 | 0 | 0 | 0 | 0 | 0.7 | 0 | 0 | 0 | 0 | 1 | 0 |
| 84 | 1 | 0 | 0 | 0 | 0 | 0 | 0 | 0.7 | 0 | 0 | 0 | 0 | 0 | 0 | 0 | 0 | 0 | 0 | 0 | 0 | 0 |
| 85 | 0 | 1 | 0 | 0 | 0 | 0 | 0 | 0 | 0 | 0 | 0 | 0 | 0 | 0 | 0 | 0 | 0 | 0 | 0 | 0.7 | 0 |
| 86 | 0 | 0 | 0 | 0 | 0 | 0 | 0 | 0 | 0 | 0 | 0 | 0 | 0 | 0 | 0 | 0 | 0 | 0.7 | 0 | 0 | 0 |
| 87 | 0 | 1 | 0 | 0 | 0 | 0 | 0.7 | 0 | 0 | 0 | 0 | 0 | 0 | 0 | 0 | 0 | 0 | 0 | 1 | 0 | 0 |
| 88 | 0 | 0 | 0 | 0 | 0 | 0 | 0 | 0 | 0 | 0 | 0 | 0 | 0 | 0 | 0 | 0 | 0 | 0 | 0.7 | 0 | 0 |
| 89 | 0 | 0 | 0 | 0 | 0 | 0 | 0 | 0 | 0 | 0 | 1 | 0 | 0 | 0 | 0 | 0 | 0 | 0 | 1 | 0.7 | 0 |
| 90 | 0 | 0.7 | 0 | 0 | 0 | 0 | 0 | 0 | 0 | 0 | 0 | 0 | 0 | 0 | 0 | 0 | 0 | 0 | 0 | 0 | 0 |
| 91 | 0 | 0 | 0 | 0 | 0 | 0 | 0 | 0 | 0 | 0.7 | 0 | 0 | 0 | 1 | 0 | 0 | 0 | 0 | 0 | 0 | 0 |
| 92 | 0 | 0 | 0 | 0 | 0 | 0 | 0 | 0 | 0.7 | 0 | 0 | 0 | 0 | 0 | 0 | 0 | 0 | 0 | 0 | 0 | 0 |
| 93 | 0 | 0 | 0 | 0 | 0 | 0 | 0 | 0 | 0 | 1 | 1 | 0 | 0 | 0 | 0 | 0 | 0 | 0 | 0 | 0.7 | 0 |
| 94 | 0 | 0 | 0 | 0 | 0 | 0 | 0.7 | 0 | 0 | 0 | 0 | 0 | 0 | 0 | 0 | 0 | 0 | 0 | 0 | 0 | 0 |
| 95 | 0 | 0 | 0 | 1 | 0 | 0.7 | 0 | 0 | 0 | 0 | 0 | 0 | 0 | 0 | 0 | 0 | 1 | 0 | 0 | 0 | 0 |
| 96 | 0 | 0 | 0 | 0 | 0 | 0 | 0 | 0 | 0 | 0 | 0.7 | 0 | 0 | 0 | 0 | 0 | 0 | 0 | 0 | 0 | 0 |
| 97 | 0.7 | 0 | 0 | 1 | 0 | 0 | 1 | 0 | 0 | 0 | 0 | 0 | 0 | 0 | 0 | 0 | 1 | 0 | 0 | 1 | 0 |
| 98 | 0 | 0 | 0 | 0 | 0 | 0 | 0 | 0 | 0 | 0 | 0 | 0 | 0 | 0 | 0 | 0 | 0 | 0 | 0 | 0.7 | 0 |
| 99 | 0 | 0 | 0 | 0 | 0 | 0 | 0.7 | 0 | 0 | 0 | 0 | 0 | 0 | 0 | 0 | 0 | 0 | 0 | 0 | 0 | 0 |
| 100 | 0 | 0 | 0 | 0 | 0 | 0 | 0.7 | 0 | 0 | 0 | 0 | 0 | 0 | 0 | 0 | 0 | 0 | 0 | 0 | 0 | 0 |
| 101 | 0 | 0 | 0 | 0 | 0 | 0 | 0 | 0 | 0 | 1 | 0.7 | 0 | 0 | 0 | 0 | 0 | 0 | 0 | 0 | 1 | 0 |
| 102 | 0 | 0 | 0 | 0 | 0 | 0 | 0 | 0 | 0 | 0 | 0 | 0 | 0 | 0 | 0 | 0.7 | 1 | 0 | 0 | 0 | 0 |
| 103 | 0 | 0 | 0 | 0 | 0 | 0 | 0 | 0 | 0 | 0 | 0 | 0 | 0 | 0 | 0 | 0 | 0.7 | 0 | 0 | 1 | 0 |
| 104 | 0 | 0 | 0 | 0.7 | 0 | 0 | 1 | 0 | 0 | 0 | 0 | 0 | 0 | 0 | 0 | 1 | 0 | 0 | 0 | 0 | 0 |
| 105 | 0 | 0 | 0 | 0 | 0 | 0 | 0.7 | 0 | 0 | 0 | 0 | 0 | 0 | 0 | 0 | 0 | 0 | 0 | 0 | 0 | 0 |
| 106 | 0 | 0 | 0 | 0 | 0 | 0 | 0 | 0 | 0 | 0 | 0 | 0 | 0 | 1 | 0 | 0 | 0 | 0 | 0.7 | 0 | 0 |
| 107 | 0 | 0 | 0 | 0 | 0 | 0 | 0 | 0 | 0 | 0 | 0.7 | 0 | 0 | 0 | 0 | 0 | 0 | 0 | 0 | 0 | 0 |
| 108 | 1 | 0 | 0 | 0 | 0 | 0.7 | 0 | 0 | 0 | 0 | 0 | 0 | 0 | 0 | 0 | 0 | 0 | 0 | 0 | 0 | 0 |
| 109 | 0.7 | 0 | 0 | 0 | 0 | 0 | 0 | 0 | 0 | 0 | 0 | 0 | 0 | 1 | 0 | 0 | 0 | 0 | 0 | 0 | 0 |
| 110 | 0 | 0 | 0 | 0 | 0 | 0 | 0 | 0 | 0 | 0 | 0 | 0.7 | 0 | 0 | 0 | 0 | 0 | 0 | 0 | 0 | 0 |
| 111 | 0 | 0 | 0 | 0 | 0 | 0 | 0.7 | 0 | 0 | 0 | 0 | 0 | 0 | 0 | 0 | 0 | 0 | 0 | 0 | 0 | 0 |
| 112 | 0 | 1 | 0 | 0 | 0 | 0.7 | 1 | 10 | 0 | 0 | 0 | 0 | 0 | 0 | 0 | 0 | 0 | 0 | 0 | 0 | 0 |
| 113 | 0 | 0 | 0 | 0 | 0 | 0 | 0 | 0 | 0 | 0 | 0.7 | 0 | 0 | 0 | 0 | 0 | 0 | 0 | 0 | 0 | 0 |
| 114 | 0 | 0 | 0 | 0 | 0 | 0 | 0 | 0 | 0 | 0 | 0 | 0 | 0 | 0 | 0 | 0 | 0 | 0 | 0 | 0.7 | 0 |
| 115 | 0 | 0 | 1 | 1 | 0 | 0 | 0 | 0.7 | 0 | 0 | 0 | 1 | 0 | 0 | 0 | 0 | 1 | 0 | 0 | 0 | 0 |
| 116 | 0 | 0 | 0 | 0 | 0 | 0 | 0 | 1 | 0 | 0 | 0.7 | 0 | 0 | 0 | 0 | 0 | 0 | 0 | 0 | 0 | 0 |
| 117 | 1 | 0 | 1 | 1 | 0 | 0 | 1 | 0.7 | 0 | 0 | 0 | 0 | 0 | 0 | 0 | 0 | 0 | 0 | 0 | 0 | 0 |
| 118 | 0.7 | 0 | 0 | 0 | 0 | 0 | 0 | 1 | 1 | 0 | 0 | 0 | 0 | 0 | 1 | 1 | 0 | 0 | 0 | 0 | 0 |
| 119 | 0 | 0 | 0 | 0 | 0 | 0 | 0.7 | 0 | 0 | 0 | 0 | 0 | 0 | 0 | 0 | 0 | 0 | 0 | 0 | 0 | 0 |
| 120 | 0 | 0 | 0 | 0 | 0 | 0 | 0 | 0.7 | 0 | 0 | 0 | 0 | 0 | 0 | 0 | 0 | 0 | 0 | 0 | 0 | 0 |
| 121 | 0 | 0 | 1 | 1 | 0 | 0 | 0.7 | 0 | 0 | 0 | 0 | 0 | 0 | 0 | 1 | 0 | 0 | 0 | 0 | 0 | 0 |
| 122 | 0.7 | 0 | 0 | 0 | 0 | 0 | 0 | 0 | 0 | 0 | 0 | 0 | 0 | 0 | 0 | 0 | 0 | 0 | 0 | 0 | 0 |
| 123 | 0 | 0 | 0 | 0 | 0 | 0 | 0 | 0 | 0 | 0 | 0 | 0 | 0 | 0 | 0 | 0 | 0 | 0 | 0 | 0.7 | 0 |
| 124 | 0 | 0 | 0 | 0 | 0 | 0 | 0 | 0 | 0 | 0 | 0.7 | 0 | 0 | 0 | 0 | 0 | 1 | 1 | 0 | 0 | 0 |
| 125 | 0 | 0 | 0 | 0 | 0 | 0 | 1 | 0 | 0 | 0 | 0 | 1 | 0 | 0 | 0 | 0 | 0.7 | 0 | 0 | 0 | 0 |
| 126 | 0 | 0 | 0 | 0 | 0 | 0 | 0 | 0 | 0 | 1 | 0 | 0 | 0 | 0 | 0 | 0 | 0 | 1 | 0 | 0.7 | 0 |
| 127 | 0 | 0 | 0 | 0.7 | 0 | 0 | 0 | 0 | 0 | 0 | 0 | 0 | 0 | 0 | 0 | 0 | 0 | 0 | 0 | 0 | 0 |
| 128 | 0 | 0 | 0 | 0 | 0 | 0 | 0 | 0 | 0 | 0 | 1 | 0 | 0 | 0.7 | 0 | 0 | 0 | 1 | 0 | 0 | 0 |
| 129 | 0 | 0 | 0 | 0 | 0 | 0 | 0.7 | 1 | 0 | 0 | 0 | 0 | 0 | 0 | 0 | 0 | 0 | 0 | 0 | 0 | 0 |
| 130 | 0 | 0 | 0 | 0.7 | 0 | 0 | 0 | 0 | 0 | 0 | 0 | 0 | 0 | 0 | 0 | 0 | 0 | 0 | 0 | 0 | 0 |
| 131 | 0 | 0 | 0 | 0 | 0 | 0 | 0 | 0 | 0 | 0 | 1 | 0 | 0 | 0.7 | 0 | 0 | 0 | 0 | 0 | 0 | 0 |
| 132 | 0 | 0.7 | 1 | 0 | 0 | 0 | 0 | 0 | 0 | 0 | 0 | 0 | 0 | 0 | 0 | 0 | 0 | 0 | 0 | 0 | 0 |
| 133 | 0 | 1 | 0 | 0 | 0 | 0 | 0 | 0 | 0 | 0 | 0 | 0 | 0 | 0 | 0.7 | 0 | 0 | 0 | 0 | 0 | 0 |
| 134 | 0 | 0 | 1 | 0 | 0 | 0 | 1 | 1 | 1 | 0 | 0 | 0 | 0 | 0 | 0 | 1 | 1 | 0 | 0 | 0.7 | 0 |
| 135 | 0 | 0 | 0 | 0 | 0 | 0 | 0 | 0 | 0 | 0 | 0 | 0 | 0 | 1 | 0 | 0.7 | 0 | 0 | 0 | 1 | 0 |
| 136 | 0 | 0 | 0 | 0 | 0 | 0.7 | 0 | 0 | 0 | 0 | 0 | 0 | 0 | 0 | 0 | 0 | 0 | 0 | 0 | 0 | 0 |
| 137 | 0 | 0.7 | 0 | 0 | 0 | 0 | 0 | 0 | 0 | 0 | 0 | 1 | 0 | 0 | 0 | 0 | 0 | 0 | 0 | 0 | 0 |
| 138 | 0 | 0 | 0 | 0 | 0 | 0 | 0 | 0 | 0 | 0 | 0.7 | 0 | 1 | 0 | 0 | 0 | 0 | 0 | 0 | 0 | 0 |
| 139 | 0 | 0 | 0 | 0 | 0 | 0 | 0 | 0 | 0 | 0 | 0 | 0.7 | 0 | 0 | 0 | 0 | 0 | 0 | 0 | 0 | 0 |
| 140 | 0 | 0 | 0 | 0.7 | 0 | 0 | 0 | 0 | 0 | 0 | 0 | 0 | 0 | 0 | 0 | 0 | 0 | 0 | 0 | 0 | 0 |
| 141 | 0 | 0 | 0 | 0 | 0 | 0 | 0.7 | 0 | 0 | 0 | 0 | 0 | 0 | 0 | 0 | 0 | 0 | 0 | 0 | 0 | 0 |
| 142 | 0 | 0 | 0 | 0 | 0 | 0 | 0 | 0 | 0 | 0 | 0 | 0 | 0 | 0 | 0 | 0.7 | 0 | 0 | 0 | 0 | 0 |
| 143 | 0 | 0 | 0 | 0 | 0 | 0 | 0 | 0 | 0 | 0 | 0 | 0 | 0 | 0 | 0 | 0 | 0.7 | 0 | 0 | 0 | 0 |
| 144 | 0 | 0 | 0 | 0 | 0 | 0 | 0 | 0 | 0 | 0.7 | 0 | 0 | 0 | 0 | 0 | 0 | 0 | 0 | 0 | 0 | 0 |
| 145 | 0 | 0 | 0 | 0 | 0 | 0 | 0 | 0.7 | 0 | 0 | 0 | 0 | 0 | 0 | 0 | 0 | 0 | 0 | 0 | 0 | 0 |
| 146 | 0 | 1 | 1 | 0.7 | 0 | 0 | 0 | 0 | 0 | 0 | 0 | 0 | 0 | 0 | 0 | 0 | 0 | 0 | 0 | 0 | 0 |
| 147 | 0 | 0 | 0 | 0 | 0 | 0 | 0 | 0.7 | 0 | 0 | 0 | 0 | 0 | 0 | 0 | 0 | 0 | 0 | 0 | 0 | 0 |
| 148 | 0 | 0 | 0 | 0 | 0 | 0 | 0 | 0 | 0 | 0 | 0.7 | 0 | 0 | 0 | 0 | 0 | 0 | 0 | 0 | 1 | 0 |
| 149 | 0 | 0 | 0 | 0 | 0 | 1 | 1 | 0 | 0 | 0 | 0 | 0 | 0 | 0 | 0 | 0 | 0.7 | 0 | 0 | 0 | 0 |
| 150 | 0 | 0 | 0 | 0 | 0 | 0 | 0 | 0 | 0.7 | 0 | 0 | 0 | 0 | 0 | 0 | 0 | 0 | 0 | 0 | 0 | 0 |
| 151 | 0 | 0 | 0 | 0 | 0 | 0 | 0 | 0 | 0 | 0 | 0.7 | 0 | 0 | 0 | 0 | 0 | 0 | 0 | 0 | 0 | 0 |
| 152 | 0 | 0 | 0.7 | 0 | 0 | 0 | 0 | 0 | 0 | 0 | 0 | 0 | 0 | 0 | 0 | 0 | 0 | 0 | 0 | 0 | 0 |
| 153 | 0 | 0.7 | 0 | 0 | 0 | 0 | 0 | 0 | 0 | 0 | 0 | 0 | 0 | 0 | 0 | 0 | 0 | 0 | 0 | 0 | 0 |
| 154 | 0 | 0 | 0 | 0 | 0 | 0 | 0 | 0 | 0.7 | 0 | 0 | 0 | 0 | 0 | 0 | 0 | 0 | 0 | 0 | 0 | 0 |
| 155 | 0 | 0 | 0 | 0 | 0 | 0 | 0 | 0 | 0 | 0 | 0.7 | 0 | 0 | 0 | 0 | 0 | 0 | 0 | 0 | 0 | 0 |
| 156 | 0.7 | 0 | 0 | 0 | 0 | 0 | 0 | 0 | 0 | 0 | 0 | 0 | 0 | 0 | 0 | 1 | 0 | 0 | 0 | 0 | 0 |
| 157 | 0 | 0 | 0 | 0 | 0 | 0 | 0 | 0.7 | 0 | 0 | 0 | 0 | 0 | 0 | 0 | 0 | 0 | 0 | 0 | 0 | 0 |
| 158 | 0 | 0.7 | 0 | 0 | 0 | 0 | 0 | 0 | 0 | 0 | 0 | 0 | 0 | 0 | 0 | 0 | 0 | 0 | 0 | 0 | 0 |
| 159 | 0 | 0 | 0 | 0 | 0 | 0 | 0 | 0 | 0 | 0.7 | 1 | 0 | 1 | 0 | 0 | 0 | 0 | 0 | 0 | 0 | 0 |
| 160 | 0 | 0 | 0 | 0 | 0 | 0 | 0 | 0 | 0 | 0 | 0 | 0 | 0 | 0 | 0 | 0 | 0 | 0.7 | 0 | 0 | 0 |
| 161 | 0 | 0 | 0 | 0 | 0 | 1 | 0 | 1 | 0 | 0 | 0 | 0 | 0 | 0 | 0 | 0 | 0.7 | 0 | 0 | 0 | 0 |
| 162 | 0 | 0 | 0 | 0.7 | 0 | 0 | 0 | 0 | 0 | 0 | 0 | 0 | 0 | 0 | 0 | 0 | 0 | 0 | 0 | 0 | 0 |
| 163 | 0 | 0 | 0 | 0 | 0 | 0 | 0 | 0 | 0 | 0 | 0.7 | 0 | 0 | 0 | 0 | 0 | 1 | 0 | 0 | 0 | 0 |
| 164 | 0.7 | 0 | 0 | 0 | 0 | 0 | 0 | 1 | 0 | 0 | 0 | 1 | 0 | 0 | 0 | 0 | 0 | 0 | 0 | 0 | 0 |
| 165 | 0.7 | 1 | 0 | 1 | 0 | 1 | 1 | 1 | 0 | 0 | 0 | 1 | 0 | 0 | 0 | 0 | 0 | 0 | 0 | 0 | 0 |
| 166 | 0 | 0 | 0 | 0 | 0 | 0 | 0 | 0.7 | 0 | 0 | 0 | 0 | 0 | 0 | 0 | 0 | 0 | 0 | 0 | 0 | 0 |
| 167 | 0 | 0.7 | 0 | 1 | 0 | 0 | 0 | 0 | 0 | 0 | 1 | 0 | 1 | 0 | 0 | 0 | 0 | 0 | 0 | 0 | 0 |
| 168 | 0 | 0 | 0 | 1 | 0 | 1 | 1 | 0 | 0 | 0 | 0 | 0 | 0 | 0 | 0 | 0.7 | 0 | 0 | 1 | 0 | 0 |
| 169 | 0.7 | 1 | 0 | 0 | 0 | 0.7 | 0 | 0 | 0 | 0 | 0 | 1 | 0 | 0 | 0 | 0 | 0 | 0 | 0 | 0 | 0 |
| 170 | 0 | 0 | 0 | 0 | 0 | 0 | 0 | 0 | 0 | 0.7 | 1 | 0 | 0 | 0 | 0 | 0 | 0 | 0 | 0 | 0 | 0 |
| 171 | 0 | 0 | 0 | 0 | 0 | 0 | 0 | 0 | 0 | 1 | 0.7 | 0 | 0 | 0 | 0 | 0 | 0 | 0 | 0 | 0 | 0 |
| 172 | 0 | 0 | 0 | 1 | 0 | 0 | 0.7 | 0 | 0 | 0 | 0 | 0 | 0 | 0 | 0 | 0 | 0 | 0 | 0 | 0 | 0 |
| 173 | 0 | 0 | 0 | 0 | 0 | 0 | 0 | 0 | 0 | 0 | 0 | 0 | 0 | 0.7 | 0 | 0 | 0 | 1 | 0 | 0 | 0 |
| 174 | 0 | 0 | 0 | 0 | 0 | 0 | 0 | 0 | 0 | 0 | 0.7 | 0 | 0 | 0 | 0 | 0 | 0 | 0 | 0 | 0 | 0 |
| 175 | 0 | 1 | 0 | 0 | 0 | 0 | 0 | 0.7 | 0 | 0 | 0 | 0 | 0 | 0 | 0 | 1 | 0 | 0 | 0 | 0 | 0 |
| 176 | 0 | 0 | 0 | 0 | 0 | 0 | 0 | 0 | 0 | 0 | 0.7 | 0 | 0 | 0 | 0 | 0 | 0 | 0 | 0 | 1 | 0 |
| 177 | 0 | 0 | 0 | 0 | 0 | 0 | 0 | 0 | 0.7 | 0 | 0 | 0 | 0 | 0 | 0 | 0 | 0 | 0 | 0 | 0 | 0 |
| 178 | 0 | 0.7 | 0 | 0 | 0 | 1 | 0 | 0 | 0 | 0 | 0 | 0 | 0 | 0 | 0 | 0 | 0 | 0 | 0 | 0 | 0 |
| 179 | 0 | 0 | 0 | 0 | 0 | 0 | 0 | 0 | 1 | 1 | 0.7 | 0 | 0 | 0 | 0 | 0 | 0 | 0 | 1 | 0 | 0 |
| 180 | 0 | 1 | 0 | 0.7 | 0 | 0 | 0 | 0 | 0 | 0 | 0 | 0 | 0 | 0 | 0 | 0 | 0 | 0 | 0 | 0 | 0 |
| 181 | 0 | 0 | 0.7 | 0 | 0 | 0 | 0 | 1 | 0 | 0 | 0 | 0 | 0 | 0 | 0 | 0 | 0 | 0 | 0 | 0 | 0 |
| 182 | 0 | 1 | 0 | 0 | 0 | 0.7 | 0 | 0 | 0 | 0 | 0 | 0 | 0 | 0 | 0 | 0 | 0 | 0 | 0 | 0 | 0 |
| 183 | 0 | 0 | 0.7 | 0 | 0 | 1 | 0 | 0 | 1 | 0 | 0 | 0 | 0 | 0 | 0 | 0 | 0 | 0 | 0 | 0 | 0 |
| 184 | 0 | 0 | 0 | 0 | 0 | 0 | 0 | 0 | 0 | 0 | 0.7 | 0 | 0 | 0 | 0 | 0 | 0 | 0 | 0 | 0 | 0 |
| 185 | 0 | 0 | 0 | 0 | 0 | 0 | 0 | 1 | 0 | 0 | 0 | 0 | 0.7 | 0 | 0 | 0 | 0 | 0 | 0 | 0 | 0 |
| 186 | 0 | 0 | 0 | 0 | 0 | 0 | 0 | 0 | 0 | 0 | 0.7 | 0 | 0 | 0 | 0 | 0 | 0 | 0 | 0 | 0 | 0 |
| 187 | 0 | 0 | 1 | 0 | 0 | 0 | 0 | 0 | 0 | 0 | 0 | 0 | 0 | 0 | 0 | 0.7 | 0 | 0 | 0 | 0 | 0 |
| 188 | 0 | 0 | 0.7 | 1 | 0 | 0 | 1 | 0 | 0 | 0 | 0 | 0 | 0 | 0 | 0 | 0 | 0 | 0 | 0 | 0 | 0 |
| 189 | 0 | 1 | 0 | 0 | 0 | 0 | 0 | 0.7 | 0 | 0 | 0 | 0 | 0 | 0 | 0 | 0 | 0 | 0 | 0 | 0 | 0 |
| 190 | 0 | 0 | 0.7 | 0 | 0 | 0 | 0 | 0 | 0 | 1 | 0 | 0 | 1 | 1 | 0 | 0 | 0 | 0 | 0 | 0 | 0 |
| 191 | 0 | 1 | 0 | 0 | 0 | 1 | 0 | 0 | 0 | 0 | 0 | 1 | 0 | 0 | 0 | 0 | 0.7 | 0 | 0 | 0 | 0 |
| 192 | 0 | 0 | 0 | 0.7 | 0 | 0 | 0 | 0 | 0 | 0 | 0 | 0 | 0 | 0 | 0 | 1 | 0 | 0 | 0 | 0 | 0 |
| 193 | 0 | 0 | 0 | 0 | 0 | 0 | 0 | 0 | 0 | 0 | 0 | 0 | 0 | 0.7 | 0 | 0 | 0 | 0 | 0 | 0 | 0 |
| 194 | 0 | 0 | 0 | 0.7 | 0 | 0 | 0 | 0 | 0 | 0 | 0 | 0 | 0 | 0 | 0 | 0 | 0 | 0 | 0 | 0 | 0 |
| 195 | 1 | 0 | 0 | 0 | 0 | 0 | 1 | 1 | 0 | 0 | 0 | 0 | 0 | 0 | 0 | 0.7 | 0 | 0 | 0 | 0 | 0 |
| 196 | 0 | 0 | 0 | 0 | 0 | 0 | 0 | 0 | 0 | 0 | 0.7 | 0 | 0 | 0 | 0 | 0 | 0 | 0 | 0 | 0 | 0 |
| 197 | 0 | 0.7 | 0 | 0 | 0 | 0 | 0 | 0 | 0 | 0 | 0 | 0 | 0 | 0 | 0 | 0 | 0 | 0 | 0 | 0 | 0 |
| 198 | 0 | 1 | 0 | 0 | 0 | 0.7 | 0 | 0 | 0 | 0 | 0 | 0 | 0 | 0 | 0 | 0 | 0 | 0 | 0 | 0 | 0 |
| 199 | 1 | 0 | 0 | 0 | 0 | 0 | 0 | 0 | 0 | 0 | 0 | 0 | 0 | 0 | 0 | 0 | 0.7 | 0 | 0 | 1 | 0 |
| 200 | 0 | 0 | 0 | 0 | 0 | 0 | 1 | 0 | 0 | 1 | 1 | 0 | 1 | 0 | 0 | 0 | 0 | 0 | 0 | 0.7 | 0 |
| 201 | 0 | 0 | 0 | 0 | 0 | 0.7 | 0 | 0 | 0 | 0 | 0 | 0 | 0 | 0 | 0 | 0 | 0 | 0 | 0 | 0 | 0 |
| 202 | 0 | 0 | 0 | 0 | 0 | 0 | 0 | 0 | 0 | 0 | 0 | 0 | 0 | 0 | 0 | 0 | 0 | 0 | 0.7 | 0 | 0 |
| 203 | 0 | 0 | 0 | 0 | 0 | 0 | 0 | 0 | 0 | 0 | 0.7 | 0 | 0 | 0 | 0 | 0 | 0 | 0 | 0 | 0 | 0 |
| 204 | 0 | 0 | 0 | 0 | 0 | 0 | 0 | 0.7 | 0 | 0 | 0 | 0 | 0 | 0 | 0 | 0 | 0 | 0 | 0 | 0 | 0 |
| 205 | 0 | 1 | 0 | 0 | 0 | 0 | 0 | 1 | 0 | 0 | 0 | 1 | 0 | 0 | 0 | 0 | 0.7 | 0 | 0 | 0 | 0 |
| 206 | 0 | 0 | 0 | 0 | 0 | 1 | 0 | 0 | 0 | 0 | 0.7 | 0 | 0 | 0 | 0 | 0 | 0 | 0 | 0 | 0 | 0 |
| 207 | 0 | 0 | 0 | 0 | 0 | 0 | 0 | 0 | 0 | 0 | 0 | 0 | 0 | 0 | 0.7 | 0 | 0 | 0 | 0 | 0 | 0 |
| 208 | 1 | 0.7 | 0 | 1 | 0 | 0 | 1 | 0 | 0 | 0 | 0 | 0 | 0 | 0 | 1 | 0 | 0 | 0 | 0 | 0 | 0 |
| 209 | 0 | 0 | 0 | 1 | 0 | 0 | 0.7 | 0 | 0 | 0 | 0 | 0 | 0 | 0 | 0 | 0 | 0 | 0 | 0 | 0 | 0 |
| 210 | 1 | 0 | 0 | 0 | 0 | 0 | 0 | 0 | 0 | 0 | 0 | 0 | 0 | 0 | 0 | 0 | 0.7 | 0 | 0 | 0 | 0 |
| 211 | 0 | 0 | 0 | 0 | 0 | 0 | 0 | 0 | 0 | 0 | 0 | 0 | 0 | 0 | 0.7 | 0 | 0 | 0 | 0 | 0 | 0 |
| 212 | 0 | 0 | 0 | 0 | 0 | 0 | 0 | 0 | 0 | 0 | 1 | 0 | 0 | 0 | 0 | 0 | 0 | 0.7 | 0 | 0 | 0 |
| 213 | 0.7 | 0 | 0 | 0 | 0 | 0 | 1 | 0 | 0 | 0 | 0 | 0 | 0 | 0 | 0 | 1 | 0 | 0 | 0 | 0 | 0 |
| 214 | 0 | 0 | 0 | 1 | 0 | 0 | 0.7 | 0 | 0 | 0 | 0 | 0 | 0 | 0 | 0 | 0 | 0 | 0 | 0 | 0 | 0 |
| 215 | 0 | 0 | 0 | 0 | 0 | 0 | 0 | 0 | 0 | 0 | 1 | 0 | 0 | 0.7 | 0 | 0 | 0 | 0 | 0 | 1 | 0 |
| 216 | 1 | 0.7 | 0 | 0 | 0 | 1 | 1 | 1 | 0 | 0 | 0 | 0 | 0 | 0 | 0 | 0 | 0 | 0 | 0 | 0 | 0 |
| 217 | 0 | 0 | 0 | 0 | 0 | 0 | 0.7 | 0 | 1 | 0 | 0 | 0 | 0 | 0 | 1 | 0 | 0 | 0 | 0 | 0 | 0 |
| 218 | 1 | 1 | 0 | 0.7 | 0 | 0 | 1 | 0 | 0 | 0 | 0 | 1 | 0 | 0 | 0 | 0 | 1 | 0 | 0 | 0 | 0 |
| 219 | 0 | 0 | 0 | 0 | 0 | 0 | 0 | 0 | 0 | 0 | 1 | 0 | 0.7 | 0 | 0 | 0 | 0 | 0 | 0 | 0 | 0 |
| 220 | 0 | 0.7 | 0 | 0 | 0 | 1 | 0 | 0 | 0 | 0 | 0 | 0 | 0 | 0 | 0 | 0 | 0 | 0 | 0 | 0 | 0 |
| 221 | 0 | 0.7 | 0 | 0 | 0 | 0 | 1 | 0 | 0 | 0 | 0 | 0 | 0 | 0 | 0 | 0 | 0 | 0 | 0 | 0 | 0 |
| 222 | 0 | 0.7 | 0 | 0 | 0 | 0 | 0 | 0 | 0 | 0 | 1 | 0 | 1 | 0 | 0 | 0 | 0 | 1 | 0 | 0 | 0 |
| 223 | 0 | 0 | 0 | 0 | 0 | 0 | 0 | 0.7 | 0 | 0 | 0 | 0 | 0 | 0 | 0 | 0 | 0 | 0 | 0 | 0 | 0 |
| 224 | 0 | 0 | 0 | 0 | 0 | 0 | 0 | 0 | 0 | 0 | 0 | 0 | 0 | 0.7 | 0 | 0 | 0 | 0 | 0 | 0 | 0 |
| 225 | 0 | 0 | 0 | 0 | 0 | 0 | 0.7 | 0 | 0 | 0 | 0 | 0 | 0 | 0 | 0 | 0 | 0 | 0 | 0 | 0 | 0 |
| 226 | 0 | 0 | 0 | 0 | 0 | 0 | 0 | 0 | 0 | 0 | 0 | 0 | 0 | 0 | 0.7 | 0 | 0 | 0 | 0 | 0 | 0 |
| 227 | 0 | 0 | 0 | 0 | 0 | 0 | 0 | 0.7 | 0 | 0 | 0 | 0 | 0 | 0 | 0 | 0 | 0 | 0 | 0 | 0 | 0 |
| 228 | 0 | 0 | 0 | 0 | 0 | 0 | 0 | 0 | 0 | 0 | 1 | 0 | 0 | 0 | 0 | 0 | 0 | 0.7 | 0 | 0 | 0 |
| 229 | 0 | 0 | 0 | 0 | 0 | 0 | 0 | 0.7 | 0 | 0 | 0 | 0 | 0 | 0 | 0 | 0 | 0 | 0 | 0 | 0 | 0 |
| 230 | 0 | 1 | 0.7 | 1 | 0 | 0 | 0 | 0 | 0 | 0 | 0 | 0 | 0 | 0 | 0 | 0 | 0 | 0 | 0 | 0 | 0 |
| 231 | 0 | 0 | 0 | 0 | 0 | 0 | 0 | 0 | 0 | 0 | 0 | 0 | 0 | 0 | 0 | 0 | 0.7 | 0 | 0 | 0 | 0 |
| 232 | 0.7 | 0 | 0 | 0 | 0 | 0 | 0 | 0 | 0 | 0 | 0 | 0 | 0 | 0 | 0 | 0 | 0 | 0 | 0 | 1 | 0 |
| 233 | 1 | 0 | 0 | 0 | 0 | 1 | 1 | 0.7 | 0 | 0 | 0 | 0 | 0 | 0 | 0 | 0 | 0 | 0 | 0 | 0 | 0 |
| 234 | 0 | 0.7 | 0 | 0 | 0 | 0 | 0 | 0 | 0 | 0 | 0 | 0 | 0 | 0 | 0 | 0 | 0 | 0 | 0 | 0 | 0 |
| 235 | 0 | 0 | 0 | 0 | 0 | 0 | 0 | 0 | 0 | 1 | 0 | 0 | 1 | 0 | 0 | 0 | 0 | 0 | 0 | 0.7 | 0 |
| 236 | 0 | 0.7 | 0 | 0 | 0 | 0 | 0 | 0 | 0 | 0 | 0 | 0 | 0 | 0 | 0 | 0 | 0 | 0 | 0 | 0 | 0 |
| 237 | 0 | 0 | 0 | 1 | 0 | 0 | 0.7 | 0 | 0 | 0 | 0 | 0 | 0 | 0 | 0 | 0 | 0 | 0 | 0 | 0 | 0 |
| 238 | 0 | 0 | 0 | 0 | 0 | 0 | 0 | 0 | 0 | 0 | 0 | 0 | 0 | 0 | 0 | 0 | 0.7 | 0 | 0 | 0 | 0 |
| 239 | 0 | 0 | 0 | 0 | 0 | 0 | 0 | 0 | 0 | 0 | 1 | 0 | 0.7 | 0 | 0 | 0 | 0 | 0 | 0 | 0 | 0 |
| 240 | 0 | 0.7 | 0 | 0 | 0 | 0 | 0 | 0 | 0 | 0 | 0 | 0 | 0 | 0 | 0 | 0 | 0 | 0 | 0 | 0 | 0 |
| 241 | 0 | 0 | 0 | 0 | 0 | 0 | 0 | 0 | 0 | 0 | 0.7 | 0 | 0 | 0 | 0 | 0 | 0 | 0 | 0 | 0 | 0 |
| 242 | 0 | 0 | 0 | 0 | 0 | 0 | 0 | 0 | 0 | 0 | 0.7 | 0 | 0 | 0 | 0 | 0 | 0 | 0 | 0 | 0 | 0 |
| 243 | 0 | 0 | 0 | 0 | 0 | 0 | 0 | 0 | 0 | 0 | 0 | 0 | 0.7 | 0 | 0 | 0 | 0 | 0 | 0 | 1 | 0 |
| 244 | 0 | 0 | 0 | 0.7 | 0 | 0 | 0 | 0 | 0 | 0 | 0 | 0 | 0 | 0 | 0 | 0 | 0 | 0 | 0 | 0 | 0 |
| 245 | 0 | 0 | 0 | 0 | 0 | 0 | 0 | 0 | 0 | 1 | 0.7 | 0 | 0 | 0 | 0 | 0 | 0 | 0 | 0 | 0 | 0 |
| 246 | 0 | 0 | 0 | 0 | 0 | 0 | 0 | 0 | 0 | 0 | 0.7 | 0 | 0 | 0 | 0 | 0 | 0 | 0 | 0 | 0 | 0 |
| 247 | 0 | 0 | 0 | 0.7 | 0 | 0 | 0 | 0 | 0 | 0 | 0 | 0 | 0 | 0 | 0 | 0 | 0 | 0 | 0 | 0 | 0 |
| 248 | 0 | 0 | 0 | 0 | 0 | 0 | 0 | 0 | 0 | 0 | 0 | 0 | 0 | 0 | 0 | 0.7 | 0 | 0 | 0 | 0 | 0 |
| 249 | 0 | 0 | 0 | 0 | 0 | 0 | 0 | 0 | 0 | 0 | 0 | 0 | 0 | 0 | 0.7 | 0 | 0 | 0 | 0 | 0 | 0 |
| 250 | 0 | 0 | 0 | 0 | 0 | 0 | 0 | 0 | 0 | 0 | 0 | 0 | 0 | 0 | 0 | 0.7 | 0 | 0 | 0 | 0 | 0 |
| 251 | 0 | 0 | 0 | 0 | 0 | 0 | 0 | 0 | 0 | 0 | 0 | 0 | 0 | 0 | 0.7 | 0 | 0 | 0 | 0 | 0 | 0 |
| 252 | 0.7 | 1 | 0 | 0 | 0 | 0 | 1 | 1 | 0 | 0 | 0 | 0 | 0 | 0 | 0 | 1 | 0 | 0 | 0 | 0 | 0 |
| 253 | 0.7 | 0 | 1 | 0 | 0 | 0 | 0 | 0 | 0 | 0 | 0 | 0 | 0 | 0 | 0 | 0 | 1 | 0 | 0 | 0 | 0 |
| 254 | 0 | 0 | 0 | 0 | 0 | 0 | 0 | 0 | 0 | 0 | 0.7 | 0 | 0 | 0 | 0 | 0 | 0 | 0 | 0 | 0 | 0 |
| 255 | 0 | 0 | 0 | 0 | 0 | 0 | 0.7 | 0 | 0 | 0 | 0 | 0 | 0 | 0 | 0 | 0 | 0 | 0 | 0 | 0 | 0 |
| 256 | 0 | 1 | 0 | 0 | 0 | 0 | 1 | 0 | 0 | 0 | 0 | 1 | 0 | 0 | 0 | 0.7 | 1 | 0 | 0 | 0 | 0 |
| 257 | 0 | 0 | 0 | 0 | 0 | 0 | 0 | 0 | 0 | 0 | 0 | 0 | 0 | 0.7 | 0 | 0 | 0 | 0 | 0 | 0 | 0 |
| 258 | 0 | 0 | 0 | 0 | 0 | 0 | 0 | 0 | 0 | 0 | 0.7 | 0 | 0 | 0 | 0 | 0 | 0 | 0 | 0 | 0 | 0 |
| 259 | 1 | 0 | 0 | 0.7 | 0 | 0 | 0 | 1 | 0 | 0 | 0 | 0 | 0 | 0 | 0 | 0 | 0 | 0 | 0 | 0 | 0 |
| 260 | 0 | 0.7 | 0 | 0 | 0 | 0 | 0 | 0 | 0 | 0 | 0 | 0 | 0 | 0 | 0 | 0 | 0 | 0 | 0 | 0 | 0 |
| 261 | 0 | 0 | 0 | 0 | 0 | 0 | 0 | 0 | 0 | 0.7 | 0 | 0 | 0 | 0 | 0 | 0 | 0 | 0 | 0 | 1 | 0 |
| 262 | 0 | 0 | 0 | 0 | 0 | 0 | 0 | 0 | 0 | 0 | 0 | 0 | 0 | 0 | 0.7 | 0 | 0 | 0 | 0 | 0 | 0 |
| 263 | 0 | 0 | 0 | 0 | 0 | 0 | 0 | 0 | 0 | 0 | 1 | 0 | 0.7 | 0 | 0 | 0 | 0 | 0 | 0 | 0 | 0 |
| 264 | 0 | 0 | 0 | 0 | 0 | 0 | 0 | 0 | 0 | 0.7 | 0 | 0 | 0 | 0 | 0 | 0 | 0 | 0 | 0 | 0 | 0 |
| 265 | 0 | 0 | 0 | 0 | 0 | 0 | 0 | 0 | 0 | 0 | 0 | 0 | 0 | 1 | 0 | 0.7 | 0 | 0 | 0 | 0 | 0 |
| 266 | 0 | 0 | 0.7 | 0 | 0 | 0 | 0 | 0 | 0 | 0 | 0 | 0 | 0 | 0 | 0 | 1 | 0 | 0 | 0 | 0 | 0 |
| 267 | 0 | 0 | 0 | 0 | 0 | 0 | 0 | 0 | 0 | 1 | 1 | 0 | 0 | 0 | 0 | 0 | 0 | 0 | 0 | 0.7 | 0 |
| 268 | 1 | 0 | 0 | 0 | 0 | 0 | 0 | 0 | 0 | 1 | 0.7 | 0 | 0 | 0 | 0 | 0 | 1 | 0 | 0 | 1 | 0 |
| 269 | 0 | 0 | 0 | 0 | 0 | 0 | 0 | 0 | 0 | 0.7 | 0 | 0 | 0 | 0 | 0 | 0 | 0 | 0 | 0 | 0 | 0 |
| 270 | 0 | 0 | 0 | 0 | 0 | 0 | 0 | 0 | 0 | 1 | 1 | 0 | 0 | 0 | 0 | 0 | 0 | 0 | 0 | 0.7 | 0 |
| 271 | 0 | 0 | 0 | 0 | 0 | 0 | 0 | 0 | 0 | 0 | 0 | 0 | 0 | 0 | 0 | 0.7 | 0 | 0 | 0 | 0 | 0 |
| 272 | 0 | 0 | 0 | 0 | 0 | 0 | 0 | 0 | 0 | 0.7 | 0 | 0 | 0 | 0 | 1 | 0 | 0 | 0 | 0 | 1 | 0 |
| 273 | 0 | 0 | 0 | 0 | 0 | 0 | 0 | 0 | 0.7 | 0 | 0 | 0 | 0 | 0 | 0 | 0 | 0 | 0 | 0 | 0 | 0 |
| 274 | 0 | 0 | 0 | 0 | 0 | 0 | 0 | 0.7 | 0 | 0 | 0 | 0 | 0 | 0 | 0 | 0 | 0 | 0 | 0 | 0 | 0 |
| 275 | 0 | 0 | 0 | 0 | 0 | 0 | 0 | 0 | 0 | 0 | 0 | 0 | 0 | 0 | 0 | 0 | 0 | 0.7 | 1 | 0 | 0 |
| 276 | 0 | 0 | 0 | 0 | 0 | 0 | 0 | 0 | 0 | 0 | 0 | 0 | 0 | 0.7 | 0 | 0 | 0 | 0 | 0 | 0 | 0 |
| 277 | 0.7 | 0 | 0 | 0 | 0 | 0 | 0 | 1 | 0 | 0 | 0 | 0 | 0 | 0 | 0 | 0 | 0 | 0 | 0 | 0 | 0 |
| 278 | 0 | 0 | 0 | 0 | 0 | 0.7 | 0 | 0 | 0 | 0 | 0 | 0 | 0 | 0 | 0 | 0 | 0 | 0 | 0 | 0 | 0 |
| 279 | 1 | 0 | 0 | 0.7 | 0 | 0 | 0 | 0 | 0 | 0 | 0 | 0 | 0 | 0 | 0 | 1 | 0 | 0 | 0 | 0 | 0 |
| 280 | 0 | 0 | 1 | 0 | 0 | 0 | 0 | 0 | 0 | 0 | 0 | 0.7 | 0 | 0 | 0 | 0 | 0 | 0 | 0 | 0 | 0 |
| 281 | 0 | 0 | 0 | 0 | 0 | 0 | 0 | 0 | 0 | 0 | 0 | 0 | 0 | 0 | 0 | 0 | 0 | 0 | 0 | 0.7 | 0 |
| 282 | 0 | 0 | 0 | 0 | 0 | 0 | 0 | 0 | 0 | 0 | 0.7 | 0 | 0 | 0 | 0 | 0 | 0 | 0 | 0 | 0 | 0 |
| 283 | 0 | 0 | 0 | 0 | 0 | 0 | 0 | 0.7 | 0 | 0 | 0 | 0 | 0 | 0 | 0 | 0 | 0 | 0 | 0 | 0 | 0 |
| 284 | 0 | 0.7 | 0 | 0 | 0 | 0 | 0 | 0 | 0 | 0 | 1 | 0 | 0 | 0 | 0 | 0 | 0 | 0 | 1 | 0 | 0 |
| 285 | 0 | 0 | 0 | 0 | 0 | 0 | 0 | 0 | 0 | 0 | 0 | 0 | 0 | 0 | 0.7 | 0 | 0 | 0 | 0 | 0 | 0 |
| 286 | 0 | 0 | 0 | 0.7 | 0 | 0 | 0 | 0 | 0 | 0 | 0 | 0 | 0 | 0 | 0 | 0 | 0 | 0 | 0 | 0 | 0 |
| 287 | 0 | 0 | 0 | 0 | 0 | 0 | 0 | 0 | 0 | 0 | 0 | 0 | 0 | 0 | 0 | 0 | 0.7 | 0 | 0 | 0 | 0 |
| 288 | 0 | 0 | 0 | 0 | 0 | 0 | 0 | 0.7 | 0 | 0 | 0 | 0 | 0 | 0 | 0 | 0 | 0 | 0 | 0 | 0 | 0 |
| 289 | 0 | 0 | 0 | 0 | 0 | 0 | 0 | 0.7 | 0 | 0 | 0 | 0 | 0 | 0 | 0 | 0 | 0 | 0 | 0 | 0 | 0 |
| 290 | 0 | 0 | 0 | 0 | 0 | 0.7 | 0 | 0 | 0 | 0 | 0 | 0 | 0 | 0 | 0 | 0 | 0 | 0 | 0 | 0 | 0 |
| 291 | 0 | 0 | 0 | 0 | 0 | 0 | 0 | 0 | 0 | 0 | 0 | 0 | 0 | 0 | 0 | 0 | 0 | 0 | 0 | 0.7 | 0 |
| 292 | 0 | 0 | 0 | 0 | 0 | 0 | 0 | 0 | 0 | 0 | 0 | 0 | 0 | 0 | 0 | 0 | 0 | 0 | 0 | 0.7 | 0 |
| 293 | 0 | 0 | 0 | 0 | 0 | 0 | 0 | 0 | 0 | 0 | 0 | 0 | 0 | 1 | 0 | 0 | 0 | 0 | 0.7 | 0 | 0 |
| 294 | 0 | 0 | 0 | 0 | 0 | 0 | 0 | 0 | 0 | 0.7 | 0 | 0 | 0 | 0 | 0 | 0 | 0 | 0 | 0 | 0 | 0 |
| 295 | 0 | 0 | 0 | 0 | 0 | 0 | 0 | 0 | 0 | 0 | 0.7 | 0 | 0 | 0 | 0 | 0 | 0 | 0 | 0 | 0 | 0 |
| 296 | 0 | 0 | 0 | 0.7 | 0 | 0 | 0 | 0 | 0 | 0 | 0 | 0 | 0 | 0 | 0 | 0 | 0 | 0 | 0 | 0 | 0 |
| 297 | 0 | 0 | 0 | 0 | 0 | 0.7 | 0 | 0 | 0 | 0 | 0 | 0 | 0 | 0 | 0 | 0 | 0 | 0 | 0 | 0 | 0 |
| 298 | 0.7 | 0 | 0 | 0 | 0 | 0 | 0 | 0 | 0 | 0 | 0 | 0 | 0 | 0 | 0 | 0 | 0 | 0 | 0 | 1 | 0 |
| 299 | 0 | 0.7 | 0 | 0 | 0 | 0 | 0 | 0 | 0 | 0 | 0 | 0 | 0 | 0 | 0 | 0 | 0 | 0 | 0 | 0 | 0 |
| 300 | 0.7 | 0 | 0 | 0 | 0 | 0 | 0 | 0 | 0 | 0 | 0 | 0 | 0 | 0 | 0 | 0 | 0 | 0 | 0 | 0 | 0 |
| 301 | 0 | 0 | 0 | 0 | 0 | 0 | 0 | 0 | 0 | 0 | 0.7 | 0 | 0 | 0 | 0 | 0 | 0 | 0 | 0 | 0 | 0 |
| 302 | 0 | 0 | 0 | 0 | 0 | 0 | 0.7 | 0 | 0 | 0 | 0 | 0 | 0 | 0 | 0 | 0 | 0 | 0 | 0 | 0 | 0 |
| 303 | 0 | 0.7 | 0 | 0 | 0 | 0 | 0 | 0 | 0 | 0 | 0 | 1 | 0 | 0 | 0 | 0 | 0 | 0 | 0 | 0 | 0 |
| 304 | 0 | 0 | 0 | 0 | 0 | 0 | 0.7 | 0 | 0 | 0 | 0 | 0 | 0 | 0 | 0 | 0 | 0 | 0 | 0 | 0 | 0 |
| 305 | 0 | 0 | 0 | 0 | 0 | 0 | 0 | 0 | 0 | 1 | 1 | 0 | 0.7 | 0 | 0 | 0 | 0 | 0 | 0 | 0 | 0 |
| 306 | 0 | 0.7 | 0 | 0 | 0 | 0 | 0 | 0 | 0 | 0 | 0 | 0 | 0 | 0 | 0 | 0 | 0 | 0 | 0 | 0 | 0 |
| 307 | 0 | 1 | 0.7 | 1 | 0 | 1 | 1 | 0 | 0 | 0 | 0 | 1 | 0 | 0 | 0 | 0 | 0 | 0 | 0 | 0 | 0 |
| 308 | 0 | 0.7 | 0 | 0 | 0 | 0 | 0 | 0 | 0 | 0 | 0 | 0 | 0 | 0 | 0 | 0 | 0 | 0 | 0 | 0 | 0 |
| 309 | 0 | 0 | 0 | 0 | 0 | 0 | 0 | 0 | 0 | 0 | 0.7 | 0 | 0 | 0 | 0 | 0 | 0 | 0 | 0 | 0 | 0 |
| 310 | 1 | 0.7 | 0 | 0 | 0 | 0 | 0 | 0 | 1 | 0 | 0 | 0 | 0 | 0 | 0 | 0 | 0 | 0 | 1 | 0 | 0 |
| 311 | 0 | 0 | 0 | 0 | 0 | 0.7 | 1 | 0 | 0 | 0 | 0 | 0 | 0 | 0 | 0 | 0 | 0 | 0 | 0 | 0 | 0 |
| 312 | 0 | 0 | 0 | 0 | 0 | 0.7 | 0 | 0 | 0 | 0 | 0 | 0 | 0 | 0 | 0 | 0 | 0 | 0 | 0 | 0 | 0 |
| 313 | 0 | 0 | 0 | 0 | 0 | 0 | 0 | 0.7 | 0 | 0 | 0 | 0 | 0 | 0 | 0 | 0 | 0 | 0 | 0 | 0 | 0 |
| 314 | 0 | 0 | 0 | 0 | 0 | 0 | 0 | 0 | 0 | 0 | 1 | 0 | 0 | 0 | 0 | 0 | 0 | 0 | 0 | 0.7 | 0 |
| 315 | 0 | 0 | 0 | 0.7 | 0 | 0 | 0 | 0 | 0 | 0 | 0 | 0 | 0 | 0 | 0 | 0 | 0 | 0 | 0 | 0 | 0 |
| 316 | 0 | 0 | 0 | 0 | 0 | 0 | 0 | 0 | 0 | 1 | 0 | 0 | 0 | 0 | 0 | 0 | 0 | 0 | 0 | 0.7 | 0 |
| 317 | 0 | 0 | 0 | 0 | 0 | 0 | 0.7 | 0 | 0 | 0 | 0 | 0 | 0 | 0 | 0 | 0 | 0 | 0 | 0 | 0 | 0 |
| 318 | 0 | 0 | 0 | 0 | 0 | 0 | 0 | 0 | 0 | 0 | 0 | 0 | 0 | 0 | 0.7 | 0 | 0 | 0 | 0 | 0 | 0 |
| 319 | 0 | 0.7 | 0 | 0 | 0 | 1 | 0 | 0 | 0 | 0 | 0 | 0 | 0 | 0 | 0 | 0 | 0 | 0 | 0 | 0 | 0 |
| 320 | 0 | 0 | 0 | 0 | 0 | 0 | 0 | 0 | 0 | 0.7 | 0 | 0 | 0 | 0 | 0 | 0 | 0 | 0 | 0 | 0 | 0 |
| 321 | 0 | 0 | 0 | 0 | 0 | 0 | 0 | 0 | 0 | 1 | 0.7 | 0 | 0 | 0 | 0 | 0 | 0 | 0 | 0 | 0 | 0 |
| 322 | 0 | 0 | 0 | 0 | 0 | 0 | 0 | 0 | 0 | 0.7 | 0 | 0 | 0 | 0 | 0 | 0 | 0 | 0 | 0 | 1 | 0 |
| 323 | 0.7 | 0 | 0 | 0 | 0 | 0 | 0 | 0 | 0 | 1 | 1 | 0 | 0 | 0 | 0 | 0 | 0 | 0 | 0 | 1 | 0 |
| 324 | 0 | 0 | 0 | 0 | 0 | 0 | 0 | 0 | 0 | 0 | 0 | 0 | 0 | 0 | 0 | 0 | 0.7 | 0 | 0 | 0 | 0 |
| 325 | 0 | 0.7 | 0 | 0 | 0 | 0 | 0 | 0 | 0 | 0 | 0 | 0 | 0 | 0 | 0 | 0 | 0 | 0 | 0 | 0 | 0 |
| 326 | 0 | 0 | 0 | 0 | 0 | 0 | 0 | 0 | 0 | 0 | 0.7 | 0 | 0 | 0 | 0 | 0 | 0 | 0 | 0 | 0 | 0 |
| 327 | 0 | 0 | 0 | 0 | 0 | 0 | 0 | 0 | 0 | 0.7 | 0 | 0 | 0 | 0 | 0 | 0 | 0 | 0 | 0 | 0 | 0 |
| 328 | 0 | 0 | 0 | 0 | 0 | 0 | 0 | 0 | 0 | 0 | 0 | 0 | 0 | 0 | 0.7 | 0 | 0 | 0 | 0 | 0 | 0 |
| 329 | 0 | 0 | 0 | 1 | 0 | 0 | 0.7 | 0 | 0 | 0 | 0 | 0 | 0 | 0 | 0 | 0 | 0 | 0 | 0 | 0 | 0 |
| 330 | 1 | 0 | 0 | 0 | 0 | 0 | 0 | 0 | 0 | 0 | 0 | 0 | 0 | 0 | 0 | 0.7 | 0 | 0 | 0 | 0 | 0 |
| 331 | 0 | 0 | 0 | 0.7 | 0 | 0 | 1 | 1 | 0 | 0 | 0 | 1 | 0 | 0 | 0 | 0 | 0 | 0 | 0 | 0 | 0 |
| 332 | 0 | 0 | 0 | 0 | 0 | 0 | 0 | 0.7 | 0 | 0 | 0 | 0 | 0 | 0 | 0 | 0 | 0 | 0 | 0 | 0 | 0 |
| 333 | 0 | 0 | 0 | 0 | 0 | 0 | 0 | 0 | 0 | 0 | 0 | 0 | 0 | 0 | 0 | 0 | 0.7 | 0 | 0 | 0 | 0 |
| 334 | 0 | 0 | 0 | 0 | 0 | 0 | 0 | 0 | 0 | 0 | 0 | 0 | 0 | 0 | 0 | 0 | 0.7 | 0 | 0 | 0 | 0 |
| 335 | 0 | 0 | 0 | 0 | 0.7 | 0 | 0 | 0 | 0 | 0 | 0 | 0 | 0 | 0 | 0 | 0 | 0 | 0 | 0 | 0 | 0 |
| 336 | 0 | 0 | 0 | 0.7 | 0 | 0 | 0 | 0 | 0 | 0 | 0 | 0 | 0 | 0 | 0 | 0 | 0 | 0 | 0 | 0 | 0 |
| 337 | 0 | 0 | 0 | 0 | 0 | 0.7 | 0 | 0 | 0 | 0 | 0 | 0 | 0 | 0 | 0 | 0 | 0 | 0 | 0 | 0 | 0 |
| 338 | 0 | 0.7 | 0 | 0 | 0 | 0 | 0 | 0 | 0 | 0 | 0 | 0 | 0 | 0 | 0 | 0 | 0 | 0 | 0 | 0 | 0 |
| 339 | 0 | 0 | 0 | 0 | 0 | 0 | 0 | 0 | 0 | 0 | 0.7 | 0 | 0 | 0 | 0 | 0 | 0 | 0 | 0 | 0 | 0 |
| 340 | 0 | 0 | 0 | 0 | 0 | 0 | 0.7 | 0 | 0 | 0 | 0 | 0 | 0 | 0 | 0 | 0 | 0 | 0 | 0 | 0 | 0 |
| 341 | 0 | 0 | 0 | 0 | 0 | 0 | 0 | 0 | 0 | 0 | 0 | 0 | 0 | 0 | 0.7 | 0 | 0 | 0 | 0 | 0 | 0 |
| 342 | 0 | 0 | 0 | 0 | 0 | 0 | 0 | 0 | 0 | 1 | 0 | 0 | 0 | 0 | 0 | 0 | 0 | 0 | 0 | 0.7 | 0 |
| 343 | 0 | 0 | 0 | 0 | 0 | 0 | 0 | 0 | 0.7 | 0 | 0 | 0 | 0 | 0 | 0 | 1 | 0 | 0 | 0 | 1 | 0 |
| 344 | 0 | 0 | 0 | 0 | 0 | 0 | 0 | 0.7 | 0 | 0 | 0 | 0 | 0 | 0 | 0 | 0 | 0 | 0 | 0 | 0 | 0 |
| 345 | 0.7 | 0 | 0 | 0 | 0 | 0 | 0 | 0 | 0 | 0 | 0 | 0 | 0 | 0 | 0 | 0 | 1 | 0 | 0 | 0 | 0 |
| 346 | 0 | 1 | 0 | 0 | 0 | 0 | 0.7 | 0 | 0 | 0 | 0 | 0 | 0 | 0 | 0 | 0 | 0 | 0 | 0 | 0 | 0 |
| 347 | 0 | 0 | 0.7 | 0 | 0 | 0 | 0 | 0 | 1 | 0 | 0 | 0 | 0 | 0 | 0 | 0 | 0 | 0 | 1 | 0 | 0 |
| 348 | 1 | 0 | 0 | 0 | 0 | 0 | 0 | 0 | 0 | 0 | 0 | 0 | 0 | 0 | 0 | 0 | 0 | 0 | 0 | 0.7 | 0 |
| 349 | 0 | 1 | 0 | 0 | 0 | 0.7 | 0 | 0 | 1 | 0 | 0 | 0 | 0 | 0 | 0 | 0 | 0 | 1 | 0 | 0 | 0 |
| 350 | 0 | 0 | 0 | 0 | 0 | 0 | 0 | 0 | 0 | 0.7 | 0 | 0 | 0 | 0 | 0 | 0 | 0 | 0 | 0 | 0 | 0 |
| 351 | 0 | 0 | 0 | 0 | 0 | 0 | 0 | 0 | 0 | 0 | 0.7 | 0 | 0 | 0 | 0 | 0 | 0 | 0 | 0 | 0 | 0 |
| 352 | 0 | 0.7 | 0 | 0 | 0 | 0 | 0 | 0 | 0 | 0 | 0 | 0 | 0 | 0 | 0 | 0 | 0 | 0 | 0 | 0 | 0 |
| 353 | 0 | 0 | 0 | 0 | 0 | 0 | 0 | 0 | 0 | 1 | 0 | 0 | 0 | 0 | 0 | 0 | 0 | 0 | 0 | 0.7 | 0 |
| 354 | 0 | 0 | 0 | 0 | 0 | 0 | 0 | 0 | 0 | 0 | 0 | 0 | 0 | 0 | 0.7 | 0 | 0 | 0 | 0 | 0 | 0 |
| 355 | 0 | 0 | 0 | 0 | 0 | 0 | 0 | 0 | 0 | 0 | 0 | 0 | 0 | 0.7 | 0 | 0 | 0 | 0 | 0 | 0 | 0 |
| 356 | 0 | 0.7 | 0 | 0 | 0 | 0 | 0 | 0 | 0 | 0 | 0 | 0 | 0 | 0 | 0 | 0 | 0 | 0 | 0 | 0 | 0 |
| 357 | 0 | 0 | 1 | 0 | 0 | 0 | 0 | 0 | 0 | 0 | 0 | 0 | 0 | 0 | 0 | 0 | 0 | 0 | 0.7 | 0 | 0 |
| 358 | 0 | 0 | 0 | 0 | 0 | 0 | 0.7 | 0 | 0 | 0 | 0 | 0 | 0 | 0 | 0 | 0 | 0 | 0 | 0 | 0 | 0 |
| 359 | 0 | 0 | 0 | 0.7 | 0 | 0 | 0 | 0 | 0 | 0 | 0 | 0 | 0 | 0 | 0 | 1 | 0 | 0 | 0 | 0 | 0 |
| 360 | 0 | 0 | 0 | 0 | 0 | 0 | 0 | 0.7 | 0 | 0 | 0 | 0 | 0 | 0 | 0 | 0 | 0 | 0 | 0 | 0 | 0 |
| 361 | 0 | 0.7 | 1 | 0 | 0 | 0 | 1 | 0 | 0 | 0 | 0 | 0 | 0 | 0 | 0 | 0 | 1 | 0 | 0 | 0 | 0 |
| 362 | 0 | 0 | 0 | 0 | 0 | 0 | 0 | 0 | 0 | 0.7 | 0 | 0 | 0 | 0 | 0 | 0 | 0 | 0 | 0 | 1 | 0 |
| 363 | 0 | 0 | 0 | 0 | 0 | 0 | 0 | 0 | 0.7 | 1 | 1 | 0 | 0 | 0 | 0 | 0 | 0 | 0 | 0 | 1 | 0 |
| 364 | 0 | 0 | 0 | 0 | 0 | 0 | 0 | 0 | 0 | 0 | 0 | 0 | 0 | 0 | 0.7 | 0 | 0 | 0 | 0 | 0 | 0 |
| 365 | 0 | 0 | 0 | 0 | 0 | 1 | 0 | 0 | 0.7 | 0 | 0 | 0 | 0 | 0 | 0 | 0 | 0 | 0 | 0 | 0 | 0 |
| 366 | 0 | 0 | 0 | 0 | 0 | 0 | 0 | 0 | 0 | 0 | 0 | 0 | 0 | 0 | 0 | 0 | 0 | 0.7 | 0 | 0 | 0 |
| 367 | 0 | 0 | 0 | 0 | 0 | 0 | 0 | 0 | 0 | 0.7 | 0 | 0 | 0 | 0 | 0 | 0 | 0 | 0 | 0 | 0 | 0 |
| 368 | 0 | 0 | 0 | 0 | 0 | 0 | 0 | 0 | 0 | 0 | 0 | 0 | 0 | 0 | 0 | 0.7 | 0 | 0 | 0 | 0 | 0 |
| 369 | 0 | 0.7 | 0 | 0 | 0 | 0 | 0 | 0 | 0 | 0 | 0 | 0 | 0 | 0 | 0 | 0 | 0 | 0 | 0 | 0 | 0 |
| 370 | 0 | 0 | 0 | 0 | 0 | 0 | 0 | 0 | 0 | 0 | 0 | 0 | 0 | 0.7 | 0 | 0 | 0 | 0 | 0 | 0 | 0 |
| 371 | 0 | 1 | 0 | 0 | 0 | 0 | 1 | 0 | 0 | 0 | 0 | 0.7 | 0 | 0 | 0 | 0 | 0 | 0 | 0 | 0 | 0 |
| 372 | 0 | 0 | 0 | 0 | 0 | 0 | 0 | 0 | 0 | 1 | 0 | 0 | 0 | 0 | 0 | 0 | 0 | 0 | 0 | 0.7 | 0 |
| 373 | 0 | 0 | 0 | 0 | 0 | 0 | 0 | 0 | 0 | 0 | 0 | 0 | 0 | 0 | 0 | 0 | 0 | 0.7 | 0 | 0 | 0 |
| 374 | 0 | 0 | 0 | 0 | 0 | 0 | 0 | 0 | 0 | 0 | 0 | 0 | 0 | 0 | 0.7 | 0 | 0 | 0 | 0 | 0 | 0 |
| 375 | 0 | 0 | 0 | 0 | 0 | 0 | 0 | 0 | 0 | 0 | 0 | 0 | 0 | 0 | 0 | 0 | 0 | 0 | 0.7 | 0 | 0 |
| 376 | 0 | 0 | 0 | 0 | 0 | 0 | 0 | 0 | 0 | 0 | 0.7 | 0 | 0 | 0 | 0 | 0 | 0 | 0 | 0 | 0 | 0 |
| 377 | 0 | 0 | 0 | 0 | 0 | 0 | 0.7 | 0 | 0 | 0 | 0 | 0 | 0 | 0 | 0 | 0 | 0 | 0 | 0 | 0 | 0 |
| 378 | 0 | 0.7 | 0 | 0 | 0 | 0 | 0 | 0 | 0 | 0 | 0 | 0 | 0 | 0 | 0 | 0 | 0 | 0 | 0 | 0 | 0 |
| 379 | 0 | 0 | 0 | 0 | 0 | 0 | 0 | 0 | 0 | 0 | 0 | 0 | 0 | 1 | 0 | 0 | 0 | 1 | 0.7 | 0 | 0 |
| 380 | 0.7 | 0 | 0 | 0 | 0 | 0 | 0 | 0 | 0 | 0 | 0 | 0 | 0 | 0 | 0 | 0 | 0 | 0 | 0 | 1 | 0 |
| 381 | 0 | 0.7 | 0 | 0 | 0 | 1 | 1 | 0 | 0 | 0 | 1 | 0 | 0 | 0 | 0 | 0.7 | 0 | 0 | 0 | 0 | 0 |
| 382 | 0 | 0 | 0 | 0.7 | 0 | 0 | 0 | 0 | 0 | 0 | 0 | 0 | 0 | 0 | 0 | 0 | 0 | 0 | 0 | 0 | 0 |
| 383 | 1 | 0 | 0 | 0 | 0 | 0 | 0 | 0 | 0 | 0 | 0.7 | 0 | 0 | 0 | 0 | 0 | 0 | 0 | 0 | 1 | 0 |
| 384 | 0 | 0 | 0 | 0 | 0 | 0 | 0.7 | 0 | 0 | 0 | 0 | 0 | 0 | 0 | 0 | 0 | 0 | 0 | 0 | 0 | 0 |
| 385 | 0 | 0.7 | 0 | 0 | 0 | 0 | 0 | 0 | 0 | 0 | 0 | 1 | 0 | 0 | 0 | 0 | 0 | 0 | 0 | 0 | 0 |
| 386 | 0 | 0 | 0 | 0 | 0 | 0 | 0.7 | 0 | 0 | 0 | 0 | 0 | 0 | 0 | 0 | 0 | 0 | 0 | 0 | 0 | 0 |
| 387 | 0 | 0 | 0 | 0 | 0 | 0 | 0 | 0 | 0 | 1 | 1 | 0 | 0 | 0 | 0 | 0 | 0 | 0 | 0 | 0.7 | 0 |
| 388 | 0 | 0 | 0 | 0 | 0 | 0 | 0 | 0 | 0 | 0 | 1 | 0.7 | 0 | 0 | 0 | 0 | 0 | 0 | 0 | 0 | 0 |
| 389 | 0.7 | 0 | 0 | 0 | 0 | 0 | 0 | 0 | 0 | 0 | 0 | 0 | 0 | 0 | 0 | 0 | 0 | 0 | 0 | 0 | 0 |
| 390 | 0 | 0 | 0 | 0 | 0 | 0 | 0.7 | 0 | 0 | 0 | 0 | 0 | 0 | 0 | 0 | 0 | 0 | 0 | 0 | 0 | 0 |
| 391 | 0 | 0 | 0 | 0 | 0 | 0 | 0 | 0 | 0 | 0 | 0.7 | 0 | 0 | 0 | 0 | 0 | 0 | 0 | 0 | 0 | 0 |
| 392 | 0 | 0 | 0 | 0 | 0 | 0 | 0 | 0.7 | 0 | 0 | 0 | 0 | 0 | 0 | 0 | 0 | 0 | 0 | 0 | 0 | 0 |
| 393 | 0 | 0 | 0 | 0 | 0 | 0 | 0 | 1 | 0 | 0 | 0 | 0 | 0 | 0 | 0 | 0.7 | 0 | 0 | 0 | 0 | 0 |
| 394 | 0 | 0.7 | 0 | 0 | 0 | 0 | 0 | 0 | 0 | 0 | 0 | 0 | 0 | 0 | 0 | 0 | 0 | 0 | 0 | 0 | 0 |
| 395 | 0 | 0 | 0 | 0 | 0 | 0 | 0 | 0 | 0 | 0 | 0 | 0 | 0 | 0 | 0.7 | 0 | 0 | 0 | 0 | 0 | 0 |
| 396 | 0 | 0 | 0 | 0.7 | 0 | 0 | 0 | 0 | 0 | 0 | 0 | 0 | 0 | 0 | 0 | 0 | 0 | 0 | 0 | 0 | 0 |
| 397 | 1 | 0 | 0 | 0 | 0 | 0 | 0 | 0 | 0 | 0 | 0.7 | 0 | 0 | 0 | 0 | 0 | 0 | 0 | 0 | 1 | 0 |
| 398 | 0 | 0 | 0 | 0 | 0 | 0 | 0 | 0 | 0 | 0.7 | 0 | 0 | 0 | 0 | 0 | 0 | 0 | 0 | 0 | 0 | 0 |
| 399 | 0 | 0 | 0 | 0 | 0 | 0 | 0 | 0 | 0 | 0.7 | 0 | 0 | 0 | 0 | 0 | 0 | 0 | 0 | 0 | 0 | 0 |
| 400 | 0 | 0 | 0 | 0 | 0 | 0 | 0 | 0.7 | 0 | 0 | 0 | 0 | 0 | 0 | 0 | 0 | 0 | 0 | 0 | 0 | 0 |
| 401 | 0 | 0 | 0.7 | 0 | 0 | 0 | 0 | 0 | 0 | 0 | 0 | 0 | 0 | 0 | 0 | 0 | 0 | 0 | 0 | 0 | 0 |
| 402 | 0 | 0 | 0 | 0 | 0 | 0 | 0 | 0 | 0 | 0 | 0 | 0 | 0 | 0 | 0 | 0 | 0 | 0 | 0.7 | 0 | 0 |
| 403 | 0 | 0 | 0 | 0 | 0 | 0 | 0 | 0 | 0 | 0 | 0 | 0 | 0 | 0 | 0 | 0.7 | 0 | 0 | 0 | 0 | 0 |
| 404 | 0 | 0 | 0 | 0.7 | 0 | 0 | 0 | 0 | 0 | 0 | 0 | 0 | 0 | 0 | 0 | 0 | 0 | 0 | 0 | 0 | 0 |
| 405 | 0 | 0 | 0 | 0 | 0 | 0 | 0 | 0.7 | 0 | 0 | 0 | 0 | 0 | 0 | 0 | 0 | 0 | 0 | 0 | 0 | 0 |
| 406 | 0 | 0 | 0.7 | 0 | 0 | 0 | 0 | 0.7 | 0 | 0 | 0 | 0 | 0 | 0 | 0 | 0 | 0 | 0 | 0 | 0 | 0 |
| 407 | 0 | 0 | 0 | 0 | 0 | 0 | 0 | 0 | 0 | 0 | 0.7 | 0 | 0 | 0 | 0 | 0 | 0 | 0 | 0 | 0 | 0 |
| 408 | 0 | 0 | 0 | 0 | 0 | 0 | 0 | 0 | 0 | 1 | 0 | 0 | 0 | 0 | 0 | 0 | 0 | 0 | 0 | 0.7 | 0 |
| 409 | 0.7 | 0 | 0 | 0 | 0 | 0 | 0 | 0 | 0 | 0 | 0 | 0 | 0 | 0 | 0 | 0 | 0 | 0 | 0 | 0 | 0 |
| 410 | 0 | 0 | 0 | 0 | 0 | 0 | 0 | 0 | 0 | 0 | 0 | 0 | 0 | 0 | 0 | 1 | 0.7 | 0 | 0 | 0 | 0 |
| 411 | 0 | 0 | 0 | 0 | 0 | 0 | 0 | 0 | 0 | 0.7 | 0.7 | 0 | 0 | 0 | 0 | 0 | 0 | 0 | 0 | 0 | 0 |
| 412 | 0 | 0 | 0 | 0 | 0 | 0 | 0 | 0 | 0 | 1 | 0.7 | 0 | 1 | 0 | 0 | 0 | 0 | 0 | 0 | 0 | 0 |
| 413 | 1 | 0 | 0 | 0 | 0 | 0 | 0 | 0 | 0 | 0 | 0 | 0 | 0 | 0 | 0 | 0.7 | 0 | 0 | 0 | 0 | 0 |
| 414 | 0 | 0 | 0 | 0 | 0 | 1 | 0.7 | 0 | 0 | 0 | 0 | 0 | 0 | 0 | 0 | 0 | 0 | 0 | 0 | 0 | 0 |
| 415 | 0 | 0 | 0 | 0 | 0 | 0 | 0 | 0 | 0 | 0 | 0 | 0.7 | 0 | 0 | 0 | 0 | 0 | 0 | 0 | 0 | 0 |
| 416 | 0 | 0 | 0 | 0 | 0 | 0 | 0 | 0 | 0 | 0 | 0.7 | 0 | 0 | 0 | 0 | 0 | 0 | 1 | 0 | 0 | 0 |
| 417 | 0 | 0 | 0 | 0 | 0 | 0 | 0 | 0.7 | 0 | 0 | 0 | 0 | 0 | 0 | 0 | 0 | 0 | 0 | 0 | 0 | 0 |
| 418 | 0 | 0 | 0 | 0 | 0 | 0 | 0 | 0 | 0 | 1 | 0 | 0 | 0 | 0 | 0 | 0 | 0 | 0 | 0 | 0.7 | 0 |
| 419 | 0 | 0 | 0 | 0 | 0 | 0 | 0 | 0 | 0 | 0 | 0 | 0 | 0 | 0 | 0 | 0 | 0.7 | 0 | 0 | 0 | 0 |
| 420 | 0 | 0 | 0 | 0 | 0 | 0.7 | 0 | 0 | 0 | 0 | 0 | 0 | 0 | 0 | 0 | 0 | 0 | 0 | 0 | 0 | 0 |
| 421 | 0 | 0 | 0 | 0 | 0.7 | 0 | 0 | 0 | 0 | 1 | 0 | 0 | 1 | 0 | 0 | 0 | 1 | 0 | 0 | 1 | 0 |
| 422 | 0 | 0 | 0.7 | 0 | 0 | 0 | 0 | 0 | 0 | 0 | 0 | 0 | 0 | 0 | 0 | 0 | 0 | 0 | 0 | 0 | 0 |
| 423 | 0 | 0 | 0 | 0 | 0 | 0 | 0 | 0 | 0 | 0.7 | 0 | 0 | 0 | 0 | 0 | 0 | 0 | 0 | 0 | 0 | 0 |
| 424 | 0.7 | 0 | 0 | 0 | 0 | 0 | 0 | 0 | 0 | 0 | 0 | 0 | 0 | 0 | 0 | 0 | 0 | 0 | 0 | 0 | 0 |
| 425 | 0 | 0 | 0 | 0 | 0 | 0 | 0 | 0 | 0.7 | 0 | 0 | 0 | 0 | 0 | 0 | 0 | 0 | 0 | 0 | 0 | 0 |
| 426 | 0.7 | 0 | 0 | 0 | 0 | 0 | 0 | 0 | 0 | 0 | 0 | 0 | 0 | 0 | 0 | 0 | 0 | 0 | 0 | 0 | 0 |
| 427 | 0 | 0 | 0 | 0 | 0 | 0 | 0 | 0 | 0 | 0 | 0.7 | 0 | 0 | 0 | 0 | 0 | 0 | 0 | 0 | 0 | 0 |
| 428 | 0 | 0 | 0 | 0 | 0 | 0 | 0.7 | 0 | 0 | 0 | 0 | 0 | 0 | 0 | 0 | 0 | 0 | 0 | 0 | 0 | 0 |
| 429 | 0 | 0 | 0 | 0 | 0 | 0 | 0 | 0 | 0 | 0 | 0 | 0.7 | 0 | 0 | 0 | 0 | 0 | 0 | 0 | 0 | 0 |
| 430 | 0 | 0 | 0 | 0 | 0 | 0 | 0 | 0 | 0 | 0 | 0 | 0 | 0 | 0 | 0 | 0.7 | 1 | 0 | 0 | 0 | 0 |
| 431 | 0 | 0 | 0 | 0 | 0 | 0 | 0 | 0 | 0 | 0 | 0 | 0.7 | 0 | 0 | 0 | 0 | 0 | 0 | 0 | 0 | 0 |
| 432 | 0 | 0 | 0 | 0 | 0 | 0 | 0 | 0 | 0 | 0 | 0 | 0 | 0 | 0 | 0 | 0 | 0 | 0 | 0.7 | 0 | 0 |
| 433 | 0 | 0 | 0 | 0 | 0 | 0 | 0 | 0 | 0 | 0 | 0.7 | 0 | 0 | 0 | 0.7 | 0 | 0 | 0 | 0 | 0 | 0 |
| 434 | 0 | 0 | 0 | 1 | 0 | 0 | 0 | 0.7 | 0 | 0 | 0 | 0 | 0 | 0 | 0 | 0 | 0 | 0 | 0.7 | 0 | 0 |
| 435 | 0 | 0 | 0 | 0 | 0 | 0 | 0 | 0 | 0 | 0 | 0 | 0 | 0 | 0 | 0 | 0.7 | 0 | 0 | 0 | 0 | 0 |
| 436 | 0 | 0 | 0 | 0.7 | 0 | 0 | 0 | 0 | 0 | 0 | 0 | 0 | 0 | 0 | 0 | 0 | 0 | 0 | 0 | 0 | 0 |
| 437 | 0 | 0 | 0 | 0 | 0 | 0 | 0 | 0 | 0 | 0 | 0.7 | 0 | 0 | 0 | 0 | 0 | 0 | 0 | 0 | 0 | 0 |
| 438 | 0 | 0 | 0 | 0 | 0 | 0 | 0 | 0 | 0.7 | 0 | 0 | 0 | 0 | 0 | 0 | 0 | 0 | 0 | 1 | 0 | 0 |
| 439 | 0 | 0 | 0 | 0 | 0 | 0 | 0 | 0 | 0 | 0 | 0 | 0 | 0 | 0 | 0 | 0 | 0 | 0.7 | 0 | 0 | 0 |
| 440 | 0 | 1 | 0 | 0 | 0 | 0 | 0 | 0 | 0 | 0 | 0 | 1 | 0 | 0 | 0.7 | 1 | 0 | 0 | 0 | 0 | 0 |
| 441 | 0 | 1 | 0 | 0.7 | 0 | 0 | 0 | 0 | 0 | 0 | 0.7 | 1 | 0 | 0 | 0 | 0 | 0 | 0 | 0 | 0 | 0 |
| 442 | 0 | 0 | 1 | 0 | 0 | 0 | 0 | 0 | 0.7 | 0 | 0 | 0 | 0 | 1 | 0 | 0 | 0 | 0 | 0.7 | 0 | 0 |
| 443 | 0 | 0 | 0 | 0 | 0 | 0 | 0.7 | 0 | 0 | 0 | 0 | 0 | 0 | 0 | 0 | 0 | 0 | 0 | 0 | 0 | 0 |
| 444 | 1 | 0 | 0 | 1 | 0 | 0.7 | 1 | 0 | 0 | 0 | 0 | 0 | 0 | 0 | 1 | 0 | 0 | 0 | 0 | 0 | 0 |
| 445 | 0 | 0 | 0 | 0.7 | 0 | 1 | 0 | 0 | 0 | 0 | 0 | 1 | 0 | 0 | 0 | 0 | 0 | 0 | 0 | 0 | 0 |
| 446 | 0 | 0 | 0 | 0 | 0 | 0 | 0 | 0 | 0.7 | 0 | 0 | 0 | 0 | 0 | 0 | 0 | 0 | 0 | 1 | 0 | 0 |
| 447 | 0 | 0 | 0 | 0 | 0 | 0 | 0 | 0 | 0.7 | 0 | 0 | 0 | 0 | 0 | 0 | 0 | 0 | 0 | 0 | 0 | 0 |
| 448 | 0 | 0 | 0 | 0 | 0 | 0 | 0 | 0 | 0 | 0 | 0 | 0 | 0 | 0.7 | 0 | 0 | 0 | 0 | 0 | 0 | 0 |
| 449 | 0.7 | 0 | 0 | 0 | 0 | 0 | 0 | 0 | 0 | 0 | 0 | 0 | 0 | 0 | 0 | 1 | 0 | 0 | 0 | 0 | 0 |
| 450 | 0 | 0 | 0 | 0 | 0.7 | 0 | 0 | 0 | 0 | 0 | 0 | 0 | 0 | 0 | 0 | 0 | 0 | 0 | 0 | 0 | 0 |
| 451 | 0 | 0 | 0 | 0 | 0 | 0.7 | 0 | 0 | 0 | 0 | 0 | 0 | 0 | 0 | 0 | 0 | 0 | 0 | 0 | 0 | 0 |
| 452 | 0 | 0 | 0 | 0 | 0 | 0 | 0 | 0 | 0 | 0 | 0 | 0 | 0 | 0.7 | 0 | 0 | 0 | 0 | 0 | 0 | 0 |
| 453 | 0 | 0 | 0 | 0 | 0 | 0 | 0 | 0 | 0 | 0 | 0 | 0 | 0 | 0 | 0 | 0 | 0.7 | 0 | 0 | 0 | 0 |
| 454 | 0.7 | 0 | 0 | 0 | 0 | 0 | 0 | 0 | 0 | 0 | 0 | 0 | 0 | 0 | 0 | 0 | 0 | 0 | 0 | 0 | 0 |
| 455 | 0 | 0 | 0 | 0.7 | 0 | 0 | 0 | 0 | 0 | 0 | 0 | 0 | 0 | 0 | 0 | 0 | 0 | 0 | 0 | 0 | 0 |
| 456 | 0 | 0 | 0 | 0 | 0 | 0 | 0 | 0 | 0 | 0 | 0.7 | 0 | 0 | 0 | 0 | 0 | 0 | 1 | 0 | 0 | 0 |
| 457 | 0 | 0 | 0 | 0 | 0 | 0 | 0 | 0 | 0 | 0.7 | 0 | 0 | 0 | 0 | 0 | 0 | 0 | 0 | 0 | 0 | 0 |
| 458 | 0.7 | 0 | 0 | 0 | 0 | 0 | 0 | 0 | 0 | 0 | 0 | 0 | 0 | 0 | 0 | 0 | 0 | 0 | 0 | 0 | 0 |
| 459 | 0 | 0 | 0 | 0 | 0 | 0 | 0 | 0 | 0 | 0 | 0 | 0 | 0.7 | 0 | 0 | 0 | 0 | 0 | 0 | 0 | 0 |
| 460 | 0 | 0 | 0.7 | 0 | 0 | 0 | 0 | 0 | 0 | 0 | 0 | 0 | 0 | 0 | 0 | 0 | 0 | 0 | 0 | 0 | 0 |
| 461 | 0.7 | 0 | 0 | 0 | 0 | 0 | 0 | 0 | 0 | 0 | 0 | 0 | 0 | 0 | 0 | 0 | 0 | 0 | 0 | 0 | 0 |
| 462 | 0.7 | 0 | 0 | 0 | 0 | 0 | 0 | 0 | 0 | 0 | 0 | 0 | 0 | 0 | 0 | 0 | 0 | 0 | 0 | 0 | 0 |
| 463 | 0 | 0 | 0 | 0.7 | 0 | 0 | 0 | 0 | 0 | 0 | 0 | 0 | 0 | 0 | 0 | 0 | 0 | 0 | 0 | 0 | 0 |
| 464 | 1 | 0 | 0 | 0 | 0 | 0 | 0 | 0 | 0 | 0.7 | 0 | 0 | 0 | 1 | 0 | 0 | 0 | 0 | 0 | 1 | 0 |
| 465 | 0 | 0 | 0 | 0 | 0 | 0 | 0 | 0 | 0 | 0.7 | 0 | 0 | 0 | 0 | 0 | 0 | 0 | 0 | 0 | 0 | 0 |
| 466 | 0 | 0 | 0 | 0 | 0 | 0 | 0 | 0 | 0 | 1 | 0 | 0 | 0 | 0 | 0 | 0 | 0 | 0 | 0 | 0.7 | 0 |
| 467 | 0 | 0 | 0 | 0 | 0 | 0 | 0 | 0 | 0 | 0 | 0 | 0 | 0 | 0 | 0 | 0 | 0.7 | 0 | 0 | 0 | 0 |
| 468 | 0 | 0 | 0 | 0 | 0 | 0 | 0 | 0 | 0 | 0 | 0 | 0 | 0 | 0 | 0 | 0.7 | 0 | 0 | 0 | 0 | 0 |
| 469 | 0 | 0 | 0 | 0 | 0 | 0 | 0 | 0 | 0 | 0 | 0 | 0 | 0 | 0 | 0 | 0 | 0.7 | 0 | 0 | 0 | 0 |
| 470 | 0 | 0 | 0 | 0 | 0 | 0 | 0 | 0 | 0 | 0 | 0 | 0 | 0 | 0 | 0 | 0 | 0 | 0 | 0.7 | 0 | 0 |
| 471 | 0 | 0 | 0 | 0 | 0 | 0.7 | 0 | 0 | 0 | 0 | 0 | 0 | 0 | 0 | 0 | 0 | 0 | 0 | 0 | 0 | 0 |
| 472 | 0 | 0 | 0 | 0 | 0 | 0 | 0.7 | 0 | 0 | 0 | 0 | 0 | 0 | 0 | 0 | 0 | 0 | 0 | 0 | 0 | 0 |
| 473 | 0 | 0 | 0 | 0 | 0 | 0 | 0 | 0 | 0 | 0.7 | 0 | 0 | 0 | 0 | 0 | 0 | 0 | 0 | 0 | 0 | 0 |
| 474 | 0.7 | 0 | 0 | 0 | 0 | 0 | 0 | 0 | 0 | 0 | 0 | 0 | 0 | 0 | 0 | 0 | 0 | 0 | 0 | 0 | 0 |
| 475 | 0 | 0 | 0 | 0 | 0 | 0 | 0 | 0.7 | 0 | 0 | 0 | 0 | 0 | 0 | 0 | 0 | 0 | 0 | 0 | 0 | 0 |
| 476 | 0 | 0 | 0.7 | 0 | 0 | 0 | 0 | 0 | 0 | 0 | 0 | 0 | 0 | 0 | 0 | 0 | 1 | 0 | 0 | 0 | 0 |
| 477 | 0 | 0 | 0 | 0.7 | 0 | 0 | 0 | 0 | 0 | 0 | 0 | 0 | 0 | 0 | 0 | 0 | 0 | 0 | 0 | 0 | 0 |
| 478 | 0 | 0.7 | 1 | 1 | 0 | 0 | 0 | 0 | 1 | 0 | 0 | 0 | 0 | 0 | 0 | 0 | 0 | 0 | 0 | 0 | 0 |
| 479 | 0 | 0 | 0 | 0 | 0 | 0 | 0.7 | 0 | 0 | 0 | 0 | 0 | 0 | 0 | 0 | 1 | 0 | 0 | 0 | 0 | 0 |
| 480 | 0 | 0 | 0 | 0 | 0 | 0 | 0 | 0 | 0 | 0 | 0 | 0 | 0 | 0 | 0 | 0 | 0 | 0 | 0 | 0.7 | 0 |
| 481 | 0 | 0 | 0 | 0 | 0 | 0 | 0 | 0.7 | 0 | 0 | 0 | 0 | 0 | 0 | 0 | 0 | 0 | 0 | 0 | 0 | 0 |
| 482 | 0 | 0 | 0 | 0 | 0 | 0.7 | 0 | 0 | 0 | 0 | 0 | 0 | 0 | 0 | 0 | 0 | 0 | 0 | 0 | 0 | 0 |
| 483 | 0 | 0 | 0 | 0 | 0 | 0 | 0 | 0 | 0 | 0 | 0 | 0 | 0 | 0 | 0 | 0 | 0 | 0 | 0.7 | 0 | 0 |
| 484 | 0 | 0 | 0 | 0 | 0 | 0 | 0.7 | 0 | 0 | 0 | 0 | 0 | 0 | 0 | 0 | 0 | 0 | 0 | 0 | 0 | 0 |
| 485 | 0 | 0 | 0 | 0 | 0 | 0 | 0 | 0 | 0 | 0 | 0 | 0 | 0 | 0 | 0 | 0.7 | 0 | 0 | 0 | 0 | 0 |
| 486 | 0 | 0 | 0 | 0 | 0 | 0 | 0 | 0 | 0.7 | 0 | 0 | 0 | 0 | 0 | 0 | 0 | 0 | 0 | 1 | 0 | 0 |
| 487 | 1 | 0 | 0 | 0 | 0 | 0.7 | 0 | 1 | 0 | 0 | 0 | 0 | 0 | 0 | 0 | 1 | 0 | 0 | 0 | 0 | 0 |
| 488 | 1 | 0 | 0 | 0.7 | 0 | 0 | 0 | 0 | 1 | 0 | 0 | 0 | 0 | 0 | 0 | 1 | 0 | 0 | 0 | 0 | 0 |
| 489 | 0 | 0 | 0 | 0 | 0 | 0 | 0 | 0 | 0 | 0 | 0 | 0 | 0 | 1 | 0 | 0 | 0 | 0 | 0.7 | 0 | 0 |
| 490 | 0 | 0 | 0 | 0 | 0 | 0 | 0 | 0 | 0 | 0 | 0 | 0 | 0 | 0 | 0 | 0 | 0.7 | 0 | 0 | 0 | 0 |
| 491 | 0 | 0 | 0 | 0 | 0 | 0 | 0 | 0 | 0 | 0 | 0.7 | 0 | 1 | 0 | 0 | 0 | 0 | 0 | 0 | 0 | 0 |
| 492 | 0 | 0 | 0 | 0 | 0 | 0 | 0 | 0 | 0 | 0 | 0 | 0 | 0 | 0 | 0.7 | 0 | 0 | 0 | 0 | 0 | 0 |
| 493 | 0 | 0 | 0 | 0 | 0 | 0 | 0 | 0.7 | 0 | 0 | 0 | 0 | 0 | 0 | 0 | 0 | 0 | 0 | 0 | 0 | 0 |
| 494 | 0 | 0 | 0 | 0 | 0 | 0 | 0 | 0 | 0 | 0 | 0.7 | 0 | 0 | 0 | 0 | 0 | 0 | 0 | 0 | 0 | 0 |
| 495 | 0 | 0 | 0 | 0 | 0 | 0 | 0 | 0 | 0 | 0 | 0 | 0 | 0 | 0 | 0 | 0 | 0 | 0 | 0.7 | 0 | 0 |
| 496 | 0 | 0.7 | 0 | 0 | 0 | 0 | 0 | 0 | 0 | 0 | 0 | 0 | 0 | 0 | 0 | 0 | 0 | 0 | 0 | 0 | 0 |
| 497 | 0 | 0 | 0 | 0 | 0 | 0 | 0 | 0 | 0 | 1 | 0 | 0 | 0 | 0 | 0 | 0 | 0 | 0 | 0 | 0.7 | 0 |
| 498 | 0 | 0 | 0 | 0 | 0 | 0 | 0.7 | 0 | 0 | 1 | 0 | 0 | 0 | 0 | 0 | 0 | 0 | 0 | 0 | 1 | 0 |
| 499 | 0 | 0 | 0.7 | 0 | 0 | 0 | 0 | 0 | 1 | 0 | 0 | 0 | 0 | 0 | 0 | 0 | 0 | 0 | 0 | 0 | 0 |
| 500 | 0 | 0 | 0 | 0 | 0 | 0 | 0 | 0.7 | 0 | 0 | 0 | 0 | 0 | 0 | 0 | 0 | 0 | 0 | 0 | 0 | 0 |
| 501 | 0 | 0 | 0 | 0 | 0 | 0 | 0 | 0 | 0 | 0.7 | 0 | 0 | 0 | 0 | 0 | 0 | 0 | 0 | 0 | 1 | 0 |
| 502 | 0 | 0 | 0 | 0.7 | 0 | 0 | 0 | 0 | 0 | 0 | 0 | 0 | 0 | 0 | 0 | 0 | 0 | 0 | 0 | 0 | 0 |
| 503 | 0 | 0 | 0 | 0 | 0 | 0 | 0 | 0 | 0 | 0 | 0 | 0 | 0 | 0 | 0 | 0 | 0 | 0 | 0 | 0.7 | 0 |
| 504 | 0 | 0 | 0 | 0 | 0 | 0 | 0 | 0 | 0 | 0 | 0 | 0 | 0 | 0.7 | 0 | 0 | 0 | 0 | 0 | 0 | 0 |
| 505 | 0 | 0 | 0 | 0.7 | 0 | 0 | 0 | 0 | 0 | 0 | 0 | 0 | 0 | 0 | 0 | 0 | 0 | 0 | 0 | 0 | 0 |
| 506 | 0 | 0 | 0 | 0 | 0 | 0 | 0 | 0 | 0 | 0 | 0 | 0 | 0 | 0 | 1 | 0.7 | 0 | 0 | 0 | 0 | 0 |
| 507 | 0 | 1 | 0 | 0 | 0 | 0 | 0 | 0 | 0 | 0 | 0 | 0.7 | 0 | 0 | 0 | 0 | 0 | 0 | 0 | 0 | 0 |
| 508 | 0 | 0 | 0 | 0 | 0 | 0 | 0 | 0 | 0 | 0 | 0 | 0 | 0 | 0.7 | 0 | 0 | 0 | 0 | 0 | 0 | 0 |
| 509 | 0 | 0 | 0.7 | 0 | 0 | 0 | 0 | 0 | 0 | 0 | 0 | 0 | 0 | 0 | 0 | 0 | 0 | 0 | 0 | 0 | 0 |
| 510 | 0 | 0 | 0 | 0 | 0 | 0 | 0 | 0 | 0 | 0.7 | 0 | 0 | 0 | 0 | 0 | 0 | 0 | 0 | 0 | 0 | 0 |
| 511 | 0 | 0 | 0 | 0 | 0 | 0 | 0 | 0 | 0 | 1 | 0 | 0 | 0 | 0 | 0 | 0 | 0 | 0 | 0 | 0.7 | 0 |
| 512 | 0 | 0 | 0 | 0 | 0 | 0 | 0 | 0 | 0 | 0 | 0 | 0 | 0 | 0 | 0 | 0.7 | 0 | 0 | 0 | 0 | 0 |
| 513 | 0 | 0 | 0 | 0 | 0 | 0 | 0 | 0 | 0 | 0 | 0 | 0 | 0 | 0 | 0.7 | 0 | 0 | 0 | 0 | 0 | 0 |
| 514 | 0 | 0 | 0 | 0 | 0 | 0 | 0 | 0.7 | 0 | 0 | 0 | 0 | 0 | 0 | 0 | 0 | 0 | 0 | 0 | 0 | 0 |
| 515 | 0.7 | 0 | 0 | 0 | 0 | 0 | 0 | 0 | 0 | 0 | 0 | 0 | 0 | 0 | 0 | 0 | 0 | 0 | 0 | 0 | 0 |
| 516 | 0 | 0 | 0 | 0.7 | 0 | 0 | 0 | 0 | 0 | 0 | 0 | 0 | 0 | 0 | 0 | 0 | 0 | 0 | 0 | 0 | 0 |
| 517 | 1 | 0 | 0 | 0 | 0 | 0 | 0 | 0 | 0 | 0 | 0 | 0 | 0 | 0 | 0.7 | 0 | 0 | 0 | 0 | 0 | 0 |
| 518 | 0 | 0.7 | 0 | 0 | 0 | 0 | 1 | 0 | 0 | 0 | 0 | 0 | 0 | 0 | 0 | 0.7 | 0 | 0 | 0 | 0 | 0 |
| 519 | 0 | 0 | 0 | 0 | 0 | 0 | 0 | 0 | 0 | 1 | 0 | 0 | 0 | 0 | 0 | 0 | 0.7 | 0 | 0 | 1 | 0 |
| 520 | 0 | 0 | 0 | 0 | 0 | 0 | 0 | 0 | 0 | 0 | 0 | 0 | 0 | 0 | 0 | 0 | 0 | 0 | 0.7 | 0 | 0 |
| 521 | 0 | 0 | 0 | 0 | 0 | 0 | 0 | 0 | 0 | 0 | 0 | 0 | 0 | 0.7 | 0 | 0 | 0 | 0 | 0 | 0 | 0 |
| 522 | 0 | 0 | 0 | 0 | 0 | 0 | 0 | 0 | 0 | 0 | 0 | 0 | 0 | 0 | 1 | 0.7 | 0 | 0 | 0 | 0 | 0 |
| 523 | 0 | 0 | 0 | 0 | 0 | 0 | 0 | 0 | 0 | 0 | 0 | 0 | 0 | 0 | 0 | 0 | 0 | 0 | 0.7 | 0 | 0 |
| 524 | 0.7 | 0 | 0 | 0 | 0 | 0 | 0 | 0 | 0 | 0 | 0 | 0 | 0 | 0 | 0 | 1 | 1 | 0 | 0 | 0 | 0 |
| 525 | 0 | 0.7 | 0 | 1 | 0 | 0 | 1 | 0 | 0 | 0 | 0 | 0 | 0 | 0 | 0 | 0 | 0 | 0 | 0 | 0 | 0 |
| 526 | 0 | 0 | 0 | 0 | 0 | 0 | 0 | 0 | 0.7 | 0 | 0 | 1 | 0 | 0 | 0 | 0 | 0.7 | 0 | 0 | 0 | 0 |
| 527 | 0 | 0 | 0 | 0 | 0 | 0 | 0.7 | 0 | 0 | 0 | 0 | 0 | 0 | 0 | 0 | 0 | 0 | 0 | 0 | 0 | 0 |
| 528 | 0 | 1 | 0 | 0 | 0 | 0 | 0.7 | 0 | 0 | 0 | 0 | 1 | 0 | 0 | 0 | 0 | 0 | 0 | 0 | 0 | 0 |
| 529 | 0 | 0.7 | 0 | 0 | 0 | 0 | 0 | 0 | 0 | 0 | 0 | 0 | 0 | 0 | 0 | 0 | 0 | 0 | 0 | 0 | 0 |
| 530 | 0 | 0 | 0 | 0 | 0 | 0 | 0 | 0 | 0 | 0 | 1 | 0 | 0 | 0.7 | 0 | 0 | 0 | 0 | 0 | 0 | 0 |
| 531 | 0 | 0 | 0 | 0 | 0 | 0 | 0 | 0 | 0 | 0 | 0 | 0 | 0 | 0 | 0 | 0.7 | 1 | 0 | 0 | 0 | 0 |
| 532 | 0 | 0 | 0 | 0 | 0 | 0 | 0 | 1 | 0 | 0 | 0 | 0 | 0 | 0 | 0 | 0.7 | 0 | 0 | 0 | 0 | 0 |
| 533 | 0 | 0 | 0 | 0 | 0 | 0 | 0 | 0 | 0 | 0 | 0.7 | 0 | 0 | 0 | 0 | 0 | 0 | 0 | 0 | 0 | 0 |
| 534 | 0 | 0 | 0 | 0 | 0 | 0 | 0 | 0 | 1 | 0 | 0 | 0 | 0 | 0 | 0 | 0 | 0 | 0.7 | 0 | 0 | 0 |
| 535 | 0 | 0 | 0 | 0 | 0 | 0 | 0 | 0 | 0 | 0 | 0 | 0 | 0 | 0 | 0.7 | 0 | 0 | 0 | 0 | 0 | 0 |
| 536 | 0 | 0 | 0 | 0 | 0 | 0 | 0.7 | 0 | 0 | 0 | 0 | 0 | 0 | 0 | 0 | 0 | 0 | 0 | 0 | 0 | 0 |
| 537 | 0 | 0 | 0 | 0 | 0 | 0 | 0 | 0 | 0 | 0.7 | 0 | 0 | 0 | 0 | 0 | 0 | 0 | 0 | 0 | 0 | 0 |
| 538 | 0 | 0 | 0 | 0 | 0 | 0 | 0.7 | 0 | 0 | 0 | 0 | 0 | 0 | 0 | 0 | 0 | 0 | 0 | 0 | 0 | 0 |
| 539 | 0 | 1 | 0 | 0 | 0 | 0 | 1 | 0 | 0 | 0 | 0 | 1 | 0 | 0 | 0 | 0.7 | 0 | 0 | 0 | 0 | 0 |
| 540 | 0 | 0 | 0 | 0 | 0 | 0 | 0 | 0 | 0 | 1 | 0.7 | 0 | 1 | 0 | 0 | 0 | 0 | 0 | 0 | 0 | 0 |
| 541 | 0 | 0 | 0 | 0 | 0 | 0 | 0 | 0 | 0 | 1 | 0.7 | 0 | 0 | 0 | 0 | 0 | 0 | 1 | 0 | 1 | 0 |
| 542 | 0 | 0 | 0 | 0 | 0 | 0 | 0 | 0 | 0 | 0 | 0 | 0 | 0 | 0.7 | 0 | 0 | 0 | 0 | 1 | 0 | 0 |
| 543 | 0 | 0 | 0 | 0 | 0 | 0 | 0 | 0.7 | 0 | 0 | 0 | 0 | 0 | 0 | 0 | 1 | 0 | 0 | 0 | 0 | 0 |
| 544 | 0 | 0.7 | 0 | 1 | 0 | 0 | 0 | 1 | 0 | 0 | 0 | 0 | 0 | 0 | 1 | 0 | 0 | 0 | 0 | 0 | 0 |
| 545 | 0 | 0 | 0 | 1 | 0 | 0 | 0.7 | 0 | 0 | 0 | 0 | 0 | 0 | 0 | 0 | 0 | 0 | 0 | 0 | 0 | 0 |
| 546 | 0 | 0 | 0 | 1 | 0 | 1 | 1 | 0 | 0 | 0 | 0 | 0 | 0 | 0 | 0.7 | 0 | 0 | 0 | 0 | 0 | 0 |
| 547 | 0 | 1 | 0 | 0 | 0 | 0 | 0 | 0.7 | 0 | 0 | 0 | 0 | 0 | 0 | 0 | 0 | 0 | 0 | 0 | 0 | 0 |
| 548 | 1 | 0 | 0 | 0 | 0 | 0 | 0 | 1 | 0 | 0 | 0 | 0 | 0 | 0 | 0.7 | 0 | 0 | 0 | 0 | 0 | 0 |
| 549 | 0 | 0 | 0 | 0.7 | 0 | 0 | 1 | 0 | 0 | 0 | 0 | 0 | 0 | 0 | 1 | 0 | 0 | 0 | 0 | 0 | 0 |
| 550 | 1 | 0 | 0 | 0 | 0 | 0 | 0 | 0 | 1 | 0.7 | 0 | 0 | 0 | 0 | 0 | 0 | 0 | 0 | 0 | 0 | 0 |
| 551 | 0 | 0.7 | 0 | 0 | 0 | 0 | 0 | 0 | 0 | 0 | 0 | 0 | 0 | 0 | 0 | 0 | 0 | 0 | 0 | 0 | 0 |
| 552 | 0 | 0 | 0 | 0 | 0 | 0 | 0 | 0.7 | 0 | 0 | 0 | 0 | 0 | 0 | 0 | 0 | 0 | 0 | 0 | 0 | 0 |
| 553 | 0 | 0 | 0 | 0 | 0 | 0 | 0 | 0 | 0 | 0 | 0 | 0 | 0 | 0 | 0 | 0 | 0 | 0 | 0 | 0.7 | 0 |
| 554 | 0 | 0 | 0 | 0 | 0 | 0 | 0 | 0 | 0 | 0 | 0.7 | 0 | 0 | 0 | 0 | 0 | 0 | 0 | 0 | 0 | 0 |
| 555 | 1 | 0 | 0 | 0 | 0 | 0 | 0.7 | 0 | 0 | 0 | 0 | 1 | 0 | 0 | 0 | 1 | 0 | 0 | 0 | 0 | 0 |
| 556 | 0 | 0 | 0 | 0.7 | 0 | 0 | 0 | 0 | 0 | 0 | 0 | 0 | 0 | 0 | 0 | 0 | 0 | 0 | 0 | 0 | 0 |
| 557 | 0 | 0.7 | 0 | 0 | 0 | 0 | 0 | 0 | 0 | 0 | 0 | 0 | 0 | 0 | 0.7 | 0 | 0 | 0 | 0 | 0 | 0 |
| 558 | 0 | 0 | 0 | 1 | 0 | 0.7 | 0 | 0 | 0 | 0 | 0 | 0 | 0 | 0 | 0 | 1 | 0 | 0 | 0 | 0 | 0 |
| 559 | 0 | 0 | 0 | 0 | 0 | 0 | 0 | 0 | 0 | 0 | 0 | 0.7 | 0 | 0 | 0 | 0 | 0 | 0 | 0 | 0 | 0 |
| 560 | 0 | 0 | 0 | 0 | 0 | 0 | 0 | 0 | 0 | 0 | 0 | 0 | 0 | 0 | 0.7 | 0 | 0 | 0 | 0 | 0 | 0 |
| 561 | 0 | 0 | 0 | 0 | 0 | 0 | 0 | 0 | 0 | 0.7 | 1 | 0 | 0 | 0 | 0 | 0 | 0 | 0 | 0 | 1 | 0 |
| 562 | 0 | 0 | 0 | 0 | 0 | 0 | 0 | 0 | 0 | 0.7 | 1 | 0 | 0 | 0 | 0 | 0 | 0 | 0 | 0 | 0 | 0 |
| 563 | 0 | 0 | 0 | 0 | 0 | 0 | 0 | 0 | 0 | 0 | 0.7 | 0 | 0 | 1 | 0 | 0 | 0 | 0 | 0 | 0 | 0 |
| 564 | 0 | 0 | 0 | 0 | 0 | 0 | 0 | 0 | 0 | 0 | 0 | 0 | 0 | 0 | 0 | 0.7 | 1 | 0 | 0 | 0 | 0 |
| 565 | 0 | 0 | 0 | 0 | 0 | 0 | 0 | 0 | 0 | 1 | 0 | 0 | 0.7 | 0 | 0 | 0 | 0 | 0 | 0 | 0.7 | 0 |
| 566 | 0.7 | 0 | 0 | 0 | 0 | 0 | 0 | 0 | 0 | 0 | 0 | 0 | 1 | 0 | 0 | 1 | 0 | 0 | 0 | 0 | 0 |
| 567 | 0 | 0.7 | 0 | 0 | 0 | 0 | 0 | 0 | 0 | 0 | 0 | 0 | 0 | 0 | 0 | 0 | 0 | 0 | 0 | 0 | 0 |
| 568 | 0 | 0 | 0 | 0 | 0 | 0 | 0 | 0 | 0 | 0 | 1 | 0 | 0.7 | 0 | 0 | 0 | 0 | 0 | 0 | 0 | 0 |
| 569 | 0 | 0 | 0 | 0.7 | 0 | 0 | 0 | 0 | 0 | 0 | 0 | 0 | 0 | 0 | 0 | 0 | 0 | 0 | 0 | 0 | 0 |
| 570 | 0 | 0.7 | 0 | 0 | 0 | 0 | 0 | 0 | 0 | 0 | 0 | 0 | 0 | 0 | 0 | 0 | 0 | 0 | 0 | 0 | 0 |
| 571 | 0 | 0 | 0 | 0 | 0 | 0 | 0 | 0 | 0 | 0.7 | 0 | 0 | 0 | 0 | 0 | 0 | 0 | 0 | 0 | 0 | 0 |
| 572 | 0 | 0 | 0 | 0 | 0 | 0 | 0 | 0 | 0 | 0 | 0 | 0.7 | 0 | 0 | 0 | 0 | 0 | 0 | 0 | 0 | 0 |
| 573 | 0 | 0 | 0.7 | 0 | 0 | 0 | 0 | 0 | 0 | 0 | 0 | 0 | 0 | 0 | 0 | 0 | 0 | 0 | 0 | 0 | 0 |
| 574 | 0 | 0 | 0 | 0 | 0 | 1 | 0 | 0 | 0 | 1 | 0.7 | 0 | 1 | 0 | 0 | 0 | 0 | 0 | 0 | 0 | 0 |
| 575 | 0 | 0 | 0 | 0 | 0 | 0 | 0 | 0 | 0 | 0 | 0 | 0 | 0 | 0 | 0 | 0.7 | 1 | 0 | 0 | 0 | 0 |
| 576 | 0 | 0 | 0 | 0 | 0 | 0 | 0 | 0.7 | 0 | 0 | 0 | 0 | 0 | 0 | 0 | 0 | 0 | 0 | 0 | 0 | 0 |
| 577 | 0 | 0 | 0 | 0 | 0 | 0 | 0 | 0 | 0 | 0 | 0.7 | 0 | 0 | 0 | 0 | 0 | 0 | 1 | 0 | 0 | 0 |
| 578 | 0.7 | 0 | 0 | 0 | 0 | 0 | 0 | 0 | 0 | 0 | 1 | 0 | 1 | 0 | 0 | 0 | 0 | 0 | 0 | 1 | 0 |
| 579 | 0 | 0 | 0 | 0 | 0 | 0 | 0.7 | 0 | 0 | 0 | 0 | 0 | 0 | 0 | 0 | 0 | 0 | 0 | 0 | 0 | 0 |
| 580 | 0 | 0 | 0 | 0 | 0 | 0 | 0 | 0 | 0 | 1 | 0.7 | 0 | 0 | 0 | 0 | 0 | 0 | 1 | 0 | 0 | 0 |
| 581 | 0 | 0 | 0 | 0 | 0 | 0 | 0 | 0 | 0 | 0 | 0 | 0 | 0 | 1 | 0 | 0 | 0 | 0 | 0.7 | 1 | 0 |
| 582 | 0 | 0 | 0 | 0 | 0 | 0 | 0 | 0.7 | 0 | 0 | 0 | 0 | 0 | 0 | 0 | 0 | 0 | 0 | 0 | 0 | 0 |
| 583 | 1 | 0.7 | 0 | 0 | 0 | 0 | 0 | 0 | 0 | 0 | 0 | 0 | 0 | 0 | 0 | 0 | 0 | 0 | 0 | 0 | 0 |
| 584 | 0 | 0 | 1 | 0 | 0 | 0 | 0 | 0 | 0 | 0 | 0 | 0 | 0 | 0 | 0 | 0.7 | 0 | 0 | 0 | 0 | 0 |
| 585 | 0.7 | 0 | 1 | 0 | 0 | 0 | 1 | 0 | 0 | 0 | 0 | 0 | 0 | 0 | 1 | 0.7 | 0 | 0 | 0 | 0 | 0 |
| 586 | 0 | 0.7 | 0 | 0 | 0 | 0 | 0 | 0 | 0 | 0 | 0 | 0 | 0 | 0 | 0 | 0 | 0 | 0 | 0 | 0 | 0 |
| 587 | 0 | 0 | 0 | 0 | 0 | 0 | 0 | 0 | 0 | 0 | 0.7 | 0 | 0 | 0 | 0 | 0 | 0 | 0 | 0 | 0 | 0 |
| 588 | 0 | 0.7 | 0 | 0 | 0 | 0 | 0 | 0 | 0 | 0 | 0 | 0 | 0 | 0 | 0 | 0 | 0 | 0 | 0 | 0 | 0 |
| 589 | 0 | 0 | 0 | 0 | 0 | 0 | 1 | 0 | 0 | 0 | 0 | 0 | 0 | 0 | 0 | 0.7 | 0 | 0 | 0 | 0 | 0 |
| 590 | 0 | 0 | 0 | 0 | 0 | 0 | 0 | 0 | 0 | 0 | 0.7 | 0 | 0 | 0 | 0 | 0 | 0 | 0 | 0 | 0 | 0 |
| 591 | 0.7 | 0 | 0 | 0 | 0 | 0 | 0 | 0 | 0 | 0 | 0 | 0 | 0 | 0 | 0 | 0 | 0 | 0 | 0 | 0 | 0 |
| 592 | 0 | 0 | 0.7 | 0 | 0 | 0 | 0 | 0 | 0 | 0 | 0 | 0 | 0 | 0 | 0 | 0 | 0 | 0 | 0 | 0 | 0 |
| 593 | 0 | 0 | 0 | 0 | 0 | 0 | 0 | 0 | 0 | 0 | 0.7 | 0 | 0 | 0 | 0 | 0 | 0 | 0 | 0 | 0 | 0 |
| 594 | 0 | 0 | 0 | 0 | 0 | 0 | 0 | 0 | 0 | 1 | 1 | 0 | 0 | 0 | 0 | 0 | 0 | 0 | 0 | 0.7 | 0 |
| 595 | 0 | 0 | 0 | 0 | 0 | 0 | 0 | 0 | 0 | 0.7 | 1 | 0 | 0 | 0 | 0 | 0 | 0 | 0 | 0 | 1 | 0 |
| 596 | 0 | 0 | 0 | 0 | 0 | 0 | 0 | 0 | 0 | 0.7 | 0 | 0 | 0 | 0 | 0 | 0 | 0 | 0 | 0 | 1 | 0 |
| 597 | 1 | 0 | 0 | 0 | 0 | 0 | 0 | 0.7 | 0 | 0 | 0 | 0 | 0 | 0 | 0 | 0 | 0 | 0 | 0 | 0 | 0 |
| 598 | 0 | 0 | 0 | 0 | 0 | 0 | 0 | 0.7 | 0 | 0 | 0 | 0 | 0 | 0 | 0 | 0 | 0 | 0 | 0 | 0 | 0 |
| 599 | 0 | 0 | 0 | 0 | 0 | 0 | 0 | 0 | 0.7 | 0 | 0 | 0 | 0 | 0 | 0 | 0 | 0 | 0 | 0 | 0 | 0 |
| 600 | 0 | 0 | 0 | 0 | 0 | 0 | 0 | 0 | 0 | 1 | 0 | 0 | 0 | 0 | 0 | 0 | 0 | 0 | 0 | 0.7 | 0 |
| 601 | 0 | 0 | 0 | 0.7 | 0 | 0 | 0 | 0 | 0 | 0 | 0 | 0 | 0 | 0 | 0 | 0 | 0 | 0 | 0 | 0 | 0 |
| 602 | 1 | 0 | 0 | 0 | 0 | 0 | 0 | 0 | 0 | 0 | 0 | 0 | 0 | 0 | 1 | 0 | 0 | 0 | 0 | 0.7 | 0 |
| 603 | 1 | 0 | 1 | 0 | 0 | 0.7 | 1 | 1 | 0 | 0 | 0 | 0 | 0 | 0 | 0 | 1 | 0 | 0 | 0 | 0 | 0 |
| 604 | 0.7 | 1 | 0.7 | 0 | 0 | 1 | 1 | 0 | 0 | 0 | 0 | 1 | 0 | 0 | 0 | 0 | 0 | 0 | 0 | 0 | 0 |
| 605 | 0 | 0 | 0 | 0 | 0 | 0 | 0 | 0 | 0 | 0 | 0 | 0 | 0 | 0 | 0 | 0.7 | 0 | 0 | 0 | 0 | 0 |
| 606 | 1 | 1 | 1 | 1 | 0 | 0 | 0 | 1 | 0 | 0 | 0 | 0 | 0.7 | 0 | 0 | 1 | 1 | 0 | 0 | 0 | 0 |
| 607 | 0 | 0 | 0 | 0.7 | 0 | 0 | 0 | 0 | 0 | 0 | 0 | 0 | 0 | 0 | 0 | 0 | 0 | 0 | 0 | 0 | 0 |
| 608 | 0.7 | 1 | 0 | 0 | 0 | 0 | 1 | 1 | 0 | 0 | 0 | 0 | 0 | 0 | 0 | 1 | 0 | 0 | 0 | 0 | 0 |
| 609 | 0 | 0 | 0 | 0 | 0 | 0 | 0.7 | 0 | 0 | 0 | 0 | 0 | 0 | 0 | 0 | 0 | 0 | 0 | 0 | 0 | 0 |
| 610 | 0 | 0 | 0 | 0 | 0 | 0 | 0.7 | 0 | 0 | 0 | 0 | 0 | 0 | 0 | 0 | 0 | 0 | 0 | 0 | 0 | 0 |
| 611 | 0 | 0.7 | 0 | 0 | 0 | 1 | 0 | 0 | 0 | 0 | 0 | 0 | 0 | 0 | 0 | 0 | 0 | 0 | 0 | 0 | 0 |
| 612 | 1 | 0 | 0 | 0 | 0 | 0 | 0.7 | 0 | 0 | 0 | 0 | 0 | 0 | 0 | 0 | 0 | 0 | 0 | 0 | 0 | 0 |
| 613 | 0 | 0 | 0 | 0 | 0 | 1 | 0.7 | 0 | 0 | 0 | 0 | 0 | 0 | 0 | 0 | 0 | 0 | 0 | 0 | 0 | 0 |
| 614 | 0 | 0 | 0 | 0 | 0 | 0 | 0 | 0 | 0 | 0.7 | 0 | 0 | 1 | 0 | 0 | 0 | 0 | 0 | 0 | 1 | 0 |
| 615 | 1 | 0.7 | 0 | 0 | 0 | 1 | 1 | 1 | 0 | 0 | 0 | 1 | 0 | 0 | 0 | 0 | 0 | 0 | 0 | 0 | 0 |
| 616 | 0 | 0.7 | 0 | 0 | 0 | 0 | 0 | 0 | 0 | 0 | 0 | 0 | 0 | 0 | 0 | 0 | 0 | 0 | 0 | 0 | 0 |
| 617 | 0 | 0 | 0 | 0 | 0 | 0 | 0 | 0 | 0 | 1 | 1 | 0 | 0.7 | 0 | 0 | 0 | 0 | 0 | 0 | 0 | 0 |
| 618 | 0 | 0 | 0 | 0 | 0 | 0 | 0 | 0 | 0.7 | 0 | 0 | 0 | 0 | 0 | 0 | 0 | 0 | 0 | 0 | 0 | 0 |
| 619 | 0 | 0 | 0 | 0 | 0 | 1 | 0.7 | 0 | 0 | 0 | 0 | 0 | 0 | 0 | 0 | 0 | 0 | 0 | 0 | 0 | 0 |
| 620 | 0 | 0 | 0 | 0 | 0 | 0 | 0 | 0 | 0 | 0.7 | 1 | 0 | 0 | 0 | 0 | 0 | 0 | 0 | 0 | 0 | 0 |
| 621 | 0 | 0 | 0 | 0 | 0 | 0 | 0 | 0 | 0 | 1 | 1 | 0 | 0.7 | 0 | 0 | 0 | 0 | 0 | 0 | 0 | 0 |
| 622 | 0 | 0 | 0 | 0.7 | 0 | 0 | 0 | 0 | 0 | 0 | 0 | 0 | 0 | 0 | 0 | 0 | 0 | 0 | 0 | 0 | 0 |
| 623 | 0 | 0.7 | 0 | 0 | 0 | 0 | 1 | 0 | 0.7 | 0 | 0 | 1 | 0 | 0 | 0 | 0 | 0 | 0 | 0 | 0 | 0 |
| 624 | 0 | 0 | 0 | 0 | 0 | 0 | 0 | 0 | 1 | 0 | 0 | 0 | 0 | 0 | 0 | 0 | 0 | 0 | 0.7 | 0 | 0 |
| 625 | 0 | 0 | 1 | 0 | 0 | 0.7 | 0 | 1 | 0 | 0 | 0 | 0 | 0 | 0 | 0 | 0 | 0 | 0 | 0 | 0 | 0 |
| 626 | 0 | 0 | 0 | 0 | 0 | 0 | 0 | 0 | 0 | 0 | 0.7 | 0 | 0 | 0 | 0 | 0 | 0 | 0 | 0 | 0 | 0 |
| 627 | 0 | 0 | 0 | 0.7 | 0 | 0 | 0 | 0 | 0 | 0 | 0 | 0 | 0 | 0 | 0 | 0 | 0 | 0 | 0 | 0 | 0 |
| 628 | 0 | 0 | 0 | 0 | 0 | 0 | 0 | 0.7 | 0 | 0 | 0 | 0 | 0 | 0 | 0 | 0 | 0 | 0 | 0 | 0 | 0 |
| 629 | 0 | 0 | 0 | 0 | 0 | 0.7 | 0 | 0 | 0 | 0 | 0 | 0 | 0 | 0 | 0 | 0 | 0 | 0 | 0 | 0 | 0 |
| 630 | 1 | 0 | 0 | 0 | 0 | 0 | 0 | 0 | 0 | 0 | 0 | 0 | 0.7 | 1 | 0 | 0 | 0 | 0 | 0 | 1 | 0 |
| 631 | 0 | 0.7 | 0 | 0 | 0 | 0 | 0 | 0 | 0 | 0 | 0 | 0 | 0 | 0 | 0 | 0 | 0 | 0 | 0 | 0 | 0 |
| 632 | 0 | 0 | 0 | 0 | 0 | 0 | 0 | 0 | 0 | 0 | 1 | 0 | 0 | 0 | 0 | 0 | 0 | 0.7 | 0 | 0 | 0 |
| 633 | 0 | 0 | 0 | 0 | 0 | 0 | 0 | 0 | 0 | 1 | 1 | 0 | 0 | 0 | 0 | 0 | 0 | 0 | 0 | 0.7 | 0 |
| 634 | 0 | 0 | 0 | 0 | 0 | 0 | 0 | 0.7 | 0 | 0 | 0 | 0 | 0 | 0 | 0 | 0 | 0 | 0 | 0 | 0 | 0 |
| 635 | 1 | 0 | 0 | 0 | 0 | 0 | 0 | 0 | 0 | 0 | 1 | 0 | 0 | 0 | 0 | 0.7 | 0 | 0 | 0 | 1 | 0 |
| 636 | 0 | 0 | 0 | 0 | 0 | 0.7 | 0 | 0 | 0.7 | 0 | 0 | 0 | 0 | 0 | 0 | 0 | 0 | 0 | 0 | 0 | 0 |
| 637 | 0 | 0 | 0 | 0 | 0 | 0 | 0 | 0 | 0 | 0 | 0.7 | 0 | 0 | 0 | 0 | 0 | 0 | 0 | 0 | 0 | 0 |
| 638 | 0 | 0 | 1 | 0.7 | 0 | 0 | 1 | 0 | 0 | 0 | 0 | 0 | 0 | 0 | 0 | 0 | 0 | 0 | 0 | 0 | 0 |
| 639 | 0 | 0 | 0 | 0 | 0 | 0 | 0 | 0 | 0 | 0 | 0 | 0.7 | 0 | 0 | 0 | 0 | 0 | 0 | 0 | 0 | 0 |
| 640 | 0 | 0.7 | 1 | 0 | 0 | 0 | 0 | 0 | 0 | 0 | 0 | 0 | 0 | 0 | 0 | 0 | 0.7 | 0 | 0 | 1 | 0 |
| 641 | 0 | 1 | 0 | 0 | 0 | 0 | 0 | 0 | 0 | 0 | 1 | 0 | 0 | 0 | 0 | 0 | 0 | 1 | 0 | 0.7 | 0 |
| 642 | 0 | 0 | 0 | 0 | 0 | 0 | 0 | 0 | 0 | 0 | 0 | 0 | 0 | 0 | 0 | 0 | 0 | 0 | 0 | 0.7 | 0 |
| 643 | 0 | 0 | 0 | 0 | 0 | 0 | 0 | 0.7 | 0 | 0 | 0 | 0 | 0 | 0 | 0 | 0 | 0 | 0 | 0 | 0 | 0 |
| 644 | 0 | 0 | 0 | 0 | 0 | 0 | 0.7 | 0 | 0 | 0 | 0 | 0 | 0 | 0 | 0 | 0 | 0 | 0 | 0 | 0 | 0 |
| 645 | 0 | 0 | 0 | 0 | 0 | 0 | 0 | 0 | 0 | 1 | 0.7 | 0 | 0 | 0 | 0 | 0 | 0 | 0 | 0 | 0 | 0 |
| 646 | 0 | 0 | 0 | 0 | 0 | 0 | 0 | 0 | 0 | 0 | 0 | 0 | 0 | 0 | 0 | 0 | 0 | 0 | 0.7 | 0 | 0 |
| 647 | 0 | 0.7 | 0 | 0 | 0 | 0 | 0 | 0 | 0 | 0 | 0 | 0 | 0 | 0 | 0 | 0 | 0 | 0 | 0 | 0 | 0 |
| 648 | 0 | 0 | 0 | 0 | 0 | 0 | 0 | 0 | 0 | 0 | 0 | 0 | 0 | 0 | 0 | 0 | 0 | 1 | 1 | 0.7 | 0 |
| 649 | 0 | 0 | 0 | 0 | 0 | 0 | 0 | 0 | 0 | 1 | 1 | 0 | 0 | 0 | 0 | 0 | 0 | 0 | 0 | 0.7 | 0 |
| 650 | 0.7 | 0 | 0 | 0 | 0 | 0 | 0 | 0 | 0 | 0 | 0 | 0 | 0 | 0 | 0 | 0 | 0 | 0 | 0 | 0 | 0 |
| 651 | 0 | 0 | 0 | 0.7 | 0 | 0 | 0 | 0 | 0 | 0 | 0 | 0 | 0 | 0 | 0 | 0 | 0 | 0 | 0 | 0 | 0 |
| 652 | 0 | 1 | 0 | 0 | 0 | 1 | 0 | 0.7 | 1 | 0 | 0 | 1 | 0 | 0 | 0 | 0 | 1 | 0 | 0 | 0 | 0 |
| 653 | 0 | 0.7 | 0 | 0 | 0 | 0 | 0 | 0 | 0 | 0 | 0 | 0 | 0 | 0 | 0 | 0 | 0 | 0 | 0 | 0 | 0 |
| 654 | 0 | 0 | 0 | 0 | 0 | 0 | 0 | 0.7 | 0 | 0 | 0 | 0 | 0 | 0 | 0 | 0 | 0 | 0 | 0 | 0 | 0 |
| 655 | 1 | 0 | 0 | 0 | 0 | 0 | 0 | 0 | 0 | 1 | 0 | 0 | 0 | 0 | 0 | 0 | 0 | 0 | 0 | 0.7 | 0 |
| 656 | 0 | 0 | 0 | 0 | 0 | 0 | 0 | 0 | 0 | 0 | 0 | 0 | 0 | 0.7 | 0 | 0 | 0 | 1 | 0 | 1 | 0 |
| 657 | 0 | 0 | 0 | 0 | 0 | 0 | 0 | 0 | 0 | 1 | 0 | 0 | 0 | 0 | 0 | 0 | 0 | 0 | 0 | 0.7 | 0 |
| 658 | 0 | 0 | 0 | 0 | 0 | 0.7 | 0 | 0 | 0 | 0 | 0 | 0 | 0 | 0 | 0 | 0 | 0 | 0 | 0 | 0 | 0 |
| 659 | 0 | 0 | 0 | 0 | 0 | 0 | 0 | 0 | 0 | 0 | 0 | 0 | 0 | 0 | 0.7 | 0 | 0 | 0 | 0 | 0 | 0 |
| 660 | 0.7 | 0 | 0 | 0 | 0 | 0 | 0 | 0 | 0 | 0 | 0 | 0 | 0 | 0 | 0 | 0 | 0 | 0 | 0 | 0 | 0 |
| 661 | 0 | 0 | 0 | 0 | 0 | 0 | 0 | 0 | 0 | 0 | 0.7 | 0 | 0 | 0 | 0 | 0 | 0 | 0 | 0 | 0 | 0 |
| 662 | 0 | 0 | 0 | 0 | 0 | 0 | 0 | 0 | 0 | 0 | 0 | 0 | 0 | 0.7 | 0 | 0 | 0 | 0 | 1 | 0 | 0 |
| 663 | 0 | 0 | 0 | 0 | 0 | 0 | 0.7 | 0 | 0 | 0 | 0 | 0 | 0 | 0 | 0 | 0 | 0 | 0 | 0 | 0 | 0 |
| 664 | 0.7 | 0 | 0 | 0 | 0 | 0 | 0 | 0 | 0 | 0 | 0 | 0 | 0 | 0 | 0 | 0 | 0 | 0 | 0 | 0 | 0 |
| 665 | 0 | 0 | 0 | 0 | 0 | 0 | 0 | 0 | 0 | 0 | 0 | 0 | 0 | 0.7 | 0 | 0 | 0 | 0 | 0 | 0 | 0 |
| 666 | 0 | 0 | 0 | 0 | 0 | 0 | 0 | 0.7 | 0 | 0 | 0 | 0 | 0 | 0 | 0 | 0 | 0 | 0 | 0 | 0 | 0 |
| 667 | 0 | 0 | 0 | 0 | 0 | 0 | 0 | 0 | 0 | 0 | 0.7 | 0 | 0 | 0 | 0 | 0 | 0 | 0 | 0 | 0 | 0 |
| 668 | 0 | 0 | 0 | 0 | 0 | 0 | 0 | 0 | 0 | 0 | 0 | 0 | 0 | 0 | 0 | 0 | 0.7 | 0 | 0 | 0 | 0 |
| 669 | 0 | 0 | 0 | 0 | 0 | 0 | 0 | 0 | 0 | 0 | 0 | 0 | 0 | 0 | 0 | 0 | 0 | 0 | 0 | 0.7 | 0 |
| 670 | 0 | 0 | 0 | 0 | 0 | 0 | 0 | 0 | 0 | 0.7 | 0 | 0 | 0 | 0 | 0 | 0 | 0 | 0 | 0 | 0 | 0 |
| 671 | 0 | 0 | 0 | 0 | 0 | 0 | 0.7 | 0 | 0 | 0 | 0 | 0 | 0 | 0 | 0 | 0 | 0 | 0 | 0 | 0 | 0 |
| 672 | 0.7 | 0 | 0 | 0 | 0 | 0 | 0 | 0 | 0 | 0 | 0 | 0 | 0 | 0 | 0 | 0 | 0 | 0 | 0 | 1 | 0 |
| 673 | 0 | 0 | 0 | 0 | 0 | 0 | 0 | 0 | 0 | 0 | 0 | 0 | 0.7 | 0 | 0 | 0 | 0 | 0 | 0 | 0 | 0 |
| 674 | 1 | 0 | 0 | 0 | 0 | 0 | 0 | 0 | 0 | 0 | 0 | 0 | 0 | 0 | 0 | 0.7 | 1 | 0 | 0 | 0 | 0 |
| 675 | 0 | 0 | 0 | 0 | 0 | 0 | 0 | 0 | 0 | 0 | 0 | 0 | 0 | 0 | 0 | 0.7 | 0 | 0 | 0 | 0 | 0 |
| 676 | 0 | 0 | 0 | 0 | 0 | 0 | 0 | 0.7 | 0 | 0 | 0 | 0 | 0 | 0 | 0 | 0 | 0 | 0 | 0 | 0 | 0 |
| 677 | 0 | 0 | 0 | 0 | 0 | 0 | 0 | 0 | 0 | 0 | 0.7 | 0 | 0 | 0 | 0 | 0 | 0 | 0 | 0 | 0 | 0 |
| 678 | 0 | 0 | 0 | 0 | 0 | 0 | 0 | 0 | 0 | 0 | 0 | 0 | 0 | 0 | 0.7 | 0 | 0 | 0 | 0 | 0 | 0 |
| 679 | 0 | 0 | 0 | 0 | 0 | 0 | 0 | 0 | 0 | 0 | 0 | 0 | 0 | 0 | 0 | 0 | 1 | 0 | 0 | 0.7 | 0 |
| 680 | 0 | 0 | 0 | 0 | 0 | 0 | 0 | 0 | 0 | 0 | 0 | 0 | 0 | 0.7 | 0 | 0 | 0 | 1 | 0 | 0 | 0 |
| 681 | 0.7 | 0 | 0 | 0 | 0 | 0 | 0 | 0 | 0 | 0 | 0 | 0 | 0 | 0 | 0 | 0 | 0 | 0 | 0 | 0 | 0 |
| 682 | 0 | 0 | 0 | 0 | 0 | 0 | 0 | 0 | 0 | 0 | 0 | 0 | 0 | 0 | 0 | 0 | 0.7 | 0 | 0 | 0 | 0 |
| 683 | 0 | 0.7 | 0 | 0 | 1 | 0 | 0 | 0 | 0 | 0 | 0 | 0 | 0 | 0 | 0 | 0 | 0 | 0 | 0 | 0 | 0 |
| 684 | 0 | 0 | 0 | 0 | 0 | 0 | 0 | 0 | 0.7 | 0 | 0 | 0 | 0 | 0 | 0 | 0 | 0 | 0 | 1 | 0 | 0 |
| 685 | 0 | 0 | 0 | 0 | 0 | 0 | 0 | 0.7 | 0 | 0 | 0 | 0 | 0 | 0 | 0 | 0 | 0 | 0 | 0 | 0 | 0 |
| 686 | 0 | 0 | 0 | 0 | 0 | 0 | 0 | 0.7 | 0 | 0 | 0 | 0 | 0 | 0 | 0 | 0 | 0 | 0 | 0 | 0 | 0 |
| 687 | 0 | 0 | 0 | 0 | 0 | 0 | 0 | 0 | 0 | 0 | 0 | 0 | 0 | 0 | 0.7 | 0 | 0 | 0 | 0 | 0 | 0 |
| 688 | 1 | 0 | 0 | 0 | 0 | 0 | 0 | 0 | 0 | 0 | 0.7 | 0 | 0 | 0 | 0 | 0 | 0 | 0 | 0 | 0 | 0 |
| 689 | 0 | 0 | 0 | 0 | 0 | 0 | 0.7 | 0 | 0 | 0 | 0 | 0 | 0 | 0 | 0 | 0 | 0 | 0 | 0 | 0 | 0 |
| 690 | 0 | 0 | 0 | 0 | 0 | 0 | 0 | 0 | 0 | 0.7 | 0 | 0 | 0 | 0 | 0 | 0 | 0 | 0 | 0 | 0 | 0 |
| 691 | 0 | 0 | 0 | 0 | 0 | 0 | 0 | 0 | 0 | 0.7 | 0 | 0 | 0 | 0 | 0 | 0 | 0 | 0 | 0 | 0 | 0 |
| 692 | 0 | 0 | 0 | 0 | 0 | 0 | 0.7 | 0 | 0 | 0 | 0 | 0 | 0 | 0 | 0 | 0 | 0 | 0 | 0 | 0 | 0 |
| 693 | 0 | 0 | 0 | 0.7 | 0 | 0 | 0 | 0 | 1 | 0 | 0 | 0 | 0 | 0 | 0 | 0 | 0 | 0 | 0 | 0 | 0 |
| 694 | 0 | 0 | 0 | 0 | 0 | 0 | 0 | 0.7 | 0 | 0 | 0 | 0 | 0 | 0 | 0 | 0 | 0 | 0 | 0 | 0 | 0 |
| 695 | 0 | 0 | 0 | 0 | 0 | 0 | 0 | 0 | 0 | 0 | 0 | 0 | 0 | 0 | 0 | 0 | 0 | 0 | 0 | 0.7 | 0 |
| 696 | 0 | 0 | 0 | 0 | 0 | 0 | 0 | 0 | 0 | 0 | 0 | 0 | 0 | 0 | 0 | 0.7 | 0 | 0 | 0 | 0 | 0 |
| 697 | 0 | 0 | 0 | 0 | 0 | 0 | 0 | 0.7 | 0 | 0 | 0 | 0 | 0 | 0 | 0 | 0 | 0 | 0 | 0 | 0 | 0 |
| 698 | 0 | 0 | 0 | 0 | 0 | 0 | 0 | 0 | 0 | 0 | 0 | 0 | 0 | 0.7 | 0 | 0 | 0 | 0 | 0 | 0 | 0 |
| 699 | 0 | 0 | 0 | 0 | 0 | 0 | 0 | 0 | 0.7 | 0 | 0 | 0 | 0 | 0 | 0 | 0 | 0 | 0 | 0 | 0 | 0 |
| 700 | 0 | 0 | 0 | 0 | 0 | 0 | 0 | 0 | 0 | 0.7 | 0 | 0 | 0 | 0 | 0 | 0 | 0 | 0 | 0 | 0 | 0 |
| 701 | 0 | 0 | 0 | 0.7 | 0 | 0 | 0 | 0 | 0 | 0 | 0 | 0 | 0 | 0 | 0 | 0 | 0 | 0 | 0 | 0 | 0 |
| 702 | 0 | 0 | 0 | 0 | 0 | 0 | 0 | 0 | 0 | 0 | 0 | 0 | 0 | 0 | 0.7 | 0 | 0 | 0 | 0 | 0 | 0 |
| 703 | 0 | 0 | 0.7 | 0 | 0 | 0 | 0 | 0 | 0 | 0 | 0 | 0 | 0 | 0 | 0 | 0 | 0 | 0 | 0 | 0 | 0 |
| 704 | 0 | 0 | 0 | 0.7 | 0 | 1 | 0 | 0 | 1 | 0 | 0 | 0 | 0 | 0 | 0 | 0 | 0 | 0 | 0 | 0 | 0 |
| 705 | 0 | 0 | 0 | 0 | 0 | 0 | 0 | 1 | 0 | 0 | 0 | 0 | 0 | 0 | 0.7 | 0 | 0 | 0 | 0 | 0 | 0 |
| 706 | 0 | 0 | 0 | 1 | 0 | 0 | 0.7 | 0 | 0 | 0 | 0 | 0 | 0 | 0 | 0 | 0 | 0 | 0 | 0 | 0 | 0 |
| 707 | 0.7 | 0 | 0 | 0 | 0 | 1 | 1 | 0 | 0 | 0 | 0 | 0 | 0 | 0 | 0 | 0 | 0 | 0 | 0 | 0 | 0 |
| 708 | 1 | 0 | 0 | 0 | 0 | 0 | 0 | 0 | 0 | 0 | 0 | 0 | 0 | 0 | 0 | 0 | 0.7 | 0 | 0 | 0.7 | 0 |
| 709 | 0.7 | 0 | 0 | 0 | 0 | 0 | 0 | 0 | 0 | 0 | 1 | 0 | 0 | 0 | 0 | 0 | 0 | 0 | 0 | 0 | 0 |
| 710 | 0 | 0 | 0 | 0 | 0 | 0 | 0.7 | 0 | 0 | 0 | 0 | 0 | 0 | 0 | 0 | 0 | 0 | 0 | 0 | 0 | 0 |
| 711 | 0 | 1 | 0 | 0 | 0 | 0 | 0 | 0 | 0 | 1 | 1 | 0.7 | 0 | 0 | 0 | 0 | 0 | 0 | 0 | 0 | 0 |
| 712 | 0 | 0 | 0 | 0 | 0 | 0 | 0 | 0 | 0 | 1 | 0.7 | 0 | 1 | 0 | 0 | 0 | 0 | 0 | 0 | 0 | 0 |
| 713 | 0.7 | 0 | 0 | 0 | 0 | 0 | 0 | 0 | 0 | 0 | 0 | 0 | 0 | 0 | 0 | 0 | 0 | 0 | 0 | 0 | 0 |
| 714 | 0 | 0 | 0 | 0.7 | 0 | 0 | 0 | 0 | 0 | 0 | 0 | 0 | 0 | 0 | 0 | 0 | 0 | 0 | 0 | 0 | 0 |
| 715 | 0 | 0 | 0 | 0 | 0 | 0 | 0 | 0 | 0 | 0 | 0 | 0 | 0 | 0.7 | 0 | 0 | 0 | 1 | 0 | 0 | 0 |
| 716 | 0 | 0 | 0 | 0 | 0 | 0 | 0 | 0 | 0 | 0 | 0.7 | 0 | 0 | 1 | 0 | 0 | 0 | 0 | 0 | 0 | 0 |
| 717 | 0 | 0 | 0 | 0 | 0 | 0 | 0.7 | 0 | 0 | 0 | 0 | 0 | 0 | 0 | 0 | 0 | 0 | 0 | 0 | 0 | 0 |
| 718 | 0.7 | 1 | 0 | 0 | 0 | 0 | 0 | 0 | 1 | 0 | 0 | 1 | 0 | 0 | 0 | 0 | 0 | 0 | 0 | 0 | 0 |
| 719 | 0.7 | 0 | 0 | 0 | 1 | 0 | 0 | 0 | 0 | 0 | 0 | 0 | 0 | 0 | 0 | 0 | 0 | 0 | 0 | 0 | 0 |
| 720 | 1 | 0.7 | 0 | 0 | 0 | 0 | 0 | 0 | 0 | 0 | 0 | 1 | 0 | 0 | 0 | 0 | 0 | 0 | 0 | 0 | 0 |
| 721 | 1 | 0 | 1 | 0 | 0 | 0 | 0.7 | 0 | 0 | 0 | 0 | 0 | 0 | 0 | 0 | 0 | 0 | 0 | 0 | 0 | 0 |
| 722 | 0 | 0.7 | 1 | 1 | 0 | 0 | 1 | 0 | 0 | 0 | 0 | 0 | 0 | 0 | 0 | 0 | 0 | 0 | 0 | 0 | 0 |
| 723 | 0 | 0 | 0 | 0 | 0 | 0 | 0 | 0 | 0 | 0 | 0 | 0 | 0 | 0 | 0.7 | 0 | 0 | 0 | 0 | 0 | 0 |
| 724 | 0 | 0 | 0 | 1 | 0 | 0 | 0 | 1 | 0 | 0 | 0 | 0.7 | 0 | 0 | 0 | 1 | 1 | 0 | 0 | 0 | 0 |
| 725 | 0 | 0 | 0 | 0 | 0 | 0 | 0 | 0 | 0 | 0 | 0 | 0 | 0 | 0 | 0 | 0 | 0 | 0 | 0.7 | 0 | 0 |
| 726 | 0 | 0 | 0 | 0 | 0 | 0 | 0 | 0 | 0 | 0 | 0 | 0 | 0 | 0 | 0 | 0 | 0 | 0.7 | 0 | 0 | 0 |
| 727 | 0 | 0 | 0 | 0 | 0 | 0 | 0.7 | 0 | 0 | 0 | 0 | 0 | 0 | 0 | 0 | 0 | 0 | 0 | 0 | 0 | 0 |
| 728 | 0 | 1 | 0 | 0 | 0 | 0 | 0.7 | 0 | 0 | 0 | 0 | 1 | 0 | 0 | 0 | 0 | 0 | 0 | 0 | 0 | 0 |
| 729 | 0 | 0 | 0 | 0 | 0 | 0 | 0 | 0 | 0 | 0.7 | 0 | 0 | 0 | 0 | 0 | 0 | 0 | 0 | 0 | 0 | 0 |
| 730 | 0 | 0 | 0 | 0 | 0 | 0 | 0 | 0 | 0 | 0 | 0 | 0 | 0 | 0 | 0 | 0.7 | 0 | 0 | 0 | 0 | 0 |
| 731 | 0 | 1 | 0 | 0.7 | 0 | 0.7 | 0 | 0 | 0 | 0 | 0 | 0 | 0 | 0 | 0 | 0 | 0 | 0 | 0 | 0 | 0 |
| 732 | 0.7 | 0 | 0 | 0 | 0 | 0 | 0 | 1 | 0 | 0 | 0 | 0 | 0 | 0 | 0 | 0 | 0 | 0 | 0 | 0 | 0 |
| 733 | 0.7 | 0 | 0 | 0 | 0 | 0 | 0 | 0 | 0 | 0 | 0 | 0 | 0 | 0 | 0 | 0 | 0 | 0 | 0 | 0 | 0 |
| 734 | 0 | 0 | 0 | 0 | 0 | 0 | 0 | 0 | 0 | 0 | 0.7 | 0 | 0 | 0 | 0 | 0 | 0 | 0 | 0 | 0 | 0 |
| 735 | 0.7 | 0 | 0 | 0 | 0 | 1 | 1 | 0 | 0 | 0 | 0 | 1 | 0 | 0 | 0 | 0 | 0 | 0 | 0 | 0 | 0 |
| 736 | 0 | 0.7 | 0 | 0 | 0 | 0 | 0 | 0 | 0 | 0 | 0 | 0 | 0 | 0 | 0 | 0 | 0 | 0 | 0 | 0 | 0 |
| 737 | 0 | 0 | 0 | 0 | 0 | 0 | 0 | 0 | 0 | 0 | 0 | 0 | 0 | 0 | 0 | 0 | 0 | 0 | 0 | 0.7 | 0 |
| 738 | 0 | 1 | 0 | 0 | 0 | 0 | 1 | 0 | 0 | 0 | 0 | 0 | 0 | 0 | 0 | 0.7 | 0 | 0 | 1 | 0 | 0 |
| 739 | 1 | 0 | 0 | 0 | 0 | 0 | 0.7 | 0 | 0 | 0 | 0 | 0 | 0 | 0 | 0 | 1 | 0 | 0 | 0 | 0 | 0 |
| 740 | 0 | 0.7 | 0 | 0 | 0 | 0 | 0 | 0 | 0 | 0 | 0 | 0 | 0 | 0 | 0 | 0 | 0 | 0 | 0 | 0 | 0 |
| 741 | 0 | 0 | 0 | 0 | 0 | 0 | 0 | 0 | 0 | 0 | 0 | 0 | 0 | 0 | 0 | 0 | 0 | 0 | 0.7 | 0 | 0 |
| 742 | 0 | 0 | 0 | 0 | 0 | 0 | 0 | 0 | 0 | 0 | 0 | 0 | 0 | 0 | 0 | 0 | 0.7 | 0 | 0 | 0 | 0 |
| 743 | 0 | 0 | 0 | 0 | 0 | 0 | 0 | 0 | 0 | 0 | 0 | 0 | 0 | 0 | 0 | 0 | 0 | 0.7 | 0 | 0 | 0 |
| 744 | 0 | 0 | 0 | 0 | 0 | 0 | 0.7 | 0 | 0 | 0 | 0 | 1 | 0 | 0 | 0 | 0 | 0 | 0 | 0 | 0 | 0 |
| 745 | 0 | 0.7 | 0 | 0 | 0 | 0 | 0 | 0 | 0 | 0 | 1 | 0 | 0 | 0 | 0 | 0 | 0 | 0 | 0 | 0 | 0 |
| 746 | 0 | 0 | 0 | 0 | 0 | 0 | 0 | 0 | 0 | 0 | 0 | 0 | 0 | 0 | 0 | 0 | 0 | 1 | 0.7 | 0 | 0 |
| 747 | 0.7 | 0 | 0 | 0 | 0 | 0 | 0 | 0 | 0 | 0 | 0 | 0 | 0 | 0 | 0 | 0 | 0 | 0 | 0 | 0 | 0 |
| 748 | 0 | 0 | 0 | 0 | 0 | 0 | 0.7 | 0 | 0 | 0 | 0 | 0 | 0 | 0 | 0 | 0 | 0 | 0 | 0 | 0 | 0 |
| 749 | 0 | 0.7 | 0 | 0 | 0 | 0 | 0 | 0 | 0 | 0 | 0 | 0 | 0 | 0 | 0 | 0 | 0 | 0 | 0 | 0 | 0 |
| 750 | 0 | 0 | 0 | 0 | 0 | 0 | 0 | 0 | 0 | 0 | 0.7 | 0 | 1 | 0 | 0 | 0 | 0 | 1 | 0 | 0 | 0 |
| 751 | 1 | 0 | 0 | 0 | 0 | 0 | 0 | 0 | 0 | 0 | 1 | 0 | 0.7 | 0 | 0 | 0 | 0 | 0 | 0 | 0 | 0 |
| 752 | 0 | 0 | 0 | 0 | 0 | 0 | 0 | 0 | 0 | 0 | 0 | 0 | 0 | 0 | 0 | 0 | 0.7 | 0 | 0 | 0 | 0 |
| 753 | 0 | 0 | 0 | 0 | 0 | 0 | 0 | 0 | 0 | 0.7 | 1 | 0 | 0 | 0 | 0 | 0 | 0 | 0 | 0 | 0 | 0 |
| 754 | 0.7 | 0 | 0 | 0 | 0 | 0 | 0 | 0 | 0 | 1 | 1 | 0 | 1 | 0 | 0 | 1 | 0 | 0 | 0 | 0 | 0 |
| 755 | 0 | 0.7 | 0 | 0 | 0 | 0 | 0 | 0 | 0 | 0 | 0 | 0 | 0 | 0 | 0 | 0 | 0 | 0 | 0 | 0 | 0 |
| 756 | 1 | 0 | 0 | 0 | 0.7 | 0 | 0 | 0 | 0 | 1 | 0 | 0 | 0 | 0 | 0 | 0 | 0 | 0 | 0 | 1 | 0 |
| 757 | 1 | 0 | 0 | 0 | 0 | 0 | 0 | 0 | 0 | 1 | 0 | 0 | 1 | 0.7 | 0 | 0 | 0 | 0 | 1 | 0 | 0 |
| 758 | 0 | 0 | 0 | 0 | 0 | 0 | 0 | 0.7 | 0 | 0 | 0 | 0 | 0 | 0 | 0 | 0 | 0 | 0 | 0 | 0 | 0 |
| 759 | 0 | 0 | 0 | 0 | 0 | 0 | 0 | 0 | 0 | 0 | 0 | 0 | 0 | 0.7 | 0 | 0 | 0 | 0 | 0 | 0 | 0 |
| 760 | 0 | 0 | 0 | 0 | 0 | 0 | 0 | 0 | 0 | 0 | 0 | 0 | 0 | 0 | 0 | 0 | 0 | 0.7 | 0 | 0 | 0 |
| 761 | 0 | 0.7 | 0 | 0 | 0 | 0 | 0 | 0 | 0 | 0 | 0 | 1 | 0 | 0 | 0 | 0 | 0 | 0 | 0 | 0 | 0 |
| 762 | 0 | 0 | 0 | 0 | 0 | 0 | 0 | 0 | 0 | 0 | 0 | 0 | 0 | 0.7 | 0 | 0 | 0 | 0 | 1 | 0 | 0 |
| 763 | 0 | 0 | 0 | 0 | 0 | 0 | 0 | 0 | 0 | 0 | 0 | 0 | 0 | 0 | 0 | 0 | 0 | 0 | 0 | 0.7 | 0 |
| 764 | 0 | 0 | 0 | 0 | 0 | 0 | 0 | 0 | 0 | 0 | 0.7 | 0 | 0 | 0 | 0 | 1 | 1 | 0 | 0 | 0 | 0 |
| 765 | 0 | 0 | 1 | 0 | 0 | 0 | 0 | 0 | 0 | 0 | 0 | 1 | 0 | 0 | 0 | 0.7 | 0 | 0 | 0 | 0 | 0 |
| 766 | 0 | 0.7 | 0 | 0 | 0 | 0 | 0 | 0 | 0 | 0 | 0 | 0 | 0 | 0 | 0 | 0 | 0 | 0 | 0 | 0 | 0 |
| 767 | 0 | 0 | 0 | 0 | 0 | 0 | 0.7 | 0 | 0 | 0 | 0 | 0 | 0 | 0 | 0 | 0 | 0 | 0 | 0 | 0 | 0 |
| 768 | 0 | 1 | 0 | 0 | 0 | 0 | 0 | 0 | 1 | 0 | 0 | 0 | 0 | 0 | 0 | 0.7 | 0 | 0 | 0 | 0 | 0 |
| 769 | 0 | 0 | 0 | 0 | 0 | 0.7 | 0 | 0 | 0 | 0 | 0 | 0 | 0 | 0 | 0 | 0 | 0 | 0 | 0 | 0 | 0 |
| 770 | 0 | 0 | 0 | 0 | 0 | 0 | 0 | 0 | 0 | 0 | 0 | 0 | 0 | 0 | 0 | 0 | 0 | 0 | 0 | 0.7 | 0 |
| 771 | 0 | 0 | 0 | 0 | 0 | 0 | 0 | 0 | 0 | 0 | 0 | 0 | 0.7 | 0 | 0 | 0 | 1 | 0 | 0 | 0 | 0 |
| 772 | 0 | 1 | 0 | 0 | 0 | 0 | 0.7 | 0 | 0 | 0 | 0 | 0 | 0 | 0 | 0 | 0 | 0 | 0 | 0 | 0 | 0 |
| 773 | 0 | 0.7 | 0 | 0 | 0 | 0 | 0 | 0 | 0 | 0 | 0 | 0 | 0 | 0 | 0 | 0 | 0 | 0 | 0 | 0 | 0 |
| 774 | 0 | 0 | 0 | 0 | 0 | 0 | 0 | 0 | 0 | 0 | 0 | 0 | 0 | 0 | 0 | 0 | 0 | 0 | 0.7 | 0 | 0 |
| 775 | 0 | 0 | 0 | 0 | 0 | 0 | 0 | 0 | 0 | 0 | 0.7 | 0 | 0 | 0 | 0 | 0 | 0 | 0 | 0 | 0 | 0 |
| 776 | 0 | 0 | 0 | 0 | 0 | 0.7 | 0 | 0 | 0 | 0 | 0 | 0 | 0 | 0 | 0 | 0 | 0 | 0 | 0 | 0 | 0 |
| 777 | 0 | 0 | 0 | 0 | 0 | 0 | 0 | 0 | 0 | 0 | 0 | 0 | 0.7 | 0 | 0 | 0 | 0 | 0 | 0 | 0 | 0 |
| 778 | 0 | 0 | 0 | 0 | 0 | 0 | 0 | 0 | 0 | 1 | 0 | 0 | 0 | 0.7 | 0 | 0 | 0 | 0 | 0 | 0 | 0 |
| 779 | 0 | 0.7 | 0 | 0 | 0 | 0 | 0 | 0 | 0 | 0 | 0 | 0 | 0 | 0 | 0 | 0 | 0 | 0 | 0 | 0 | 0 |
| 780 | 0 | 0 | 0 | 0 | 0 | 0 | 0 | 0 | 0.7 | 0 | 0 | 0 | 0 | 0 | 0 | 0 | 0 | 0 | 0 | 0 | 0 |
| 781 | 0 | 0 | 0 | 0 | 0 | 0 | 0 | 0 | 0 | 0 | 0.7 | 0 | 0 | 0 | 0 | 0 | 0 | 0 | 0 | 0 | 0 |
| 782 | 0 | 0 | 0 | 0 | 0 | 0.7 | 0 | 0 | 0 | 0 | 0 | 0 | 0 | 0 | 0 | 0 | 0 | 0 | 0 | 0 | 0 |
| 783 | 0 | 0 | 0 | 0 | 0 | 0 | 0 | 0 | 0 | 0 | 0 | 0 | 0 | 1 | 0 | 0 | 0 | 0.7 | 1 | 0 | 0 |
| 784 | 0 | 0.7 | 0 | 0 | 0 | 0 | 0 | 0 | 0 | 0 | 0 | 0 | 0 | 0 | 0 | 0 | 0 | 0 | 0 | 0 | 0 |
| 785 | 0 | 0 | 0 | 0 | 0 | 0 | 0 | 0 | 0 | 0 | 0 | 0 | 0 | 0 | 0.7 | 0 | 0 | 0 | 0 | 0 | 0 |
| 786 | 0 | 0 | 0 | 0 | 0 | 0 | 0 | 0 | 0 | 0 | 0.7 | 0 | 0 | 0 | 0 | 0 | 0 | 0 | 0 | 0 | 0 |
| 787 | 0.7 | 0 | 0 | 0 | 0 | 0 | 0 | 0 | 0 | 0 | 0 | 0 | 0 | 0 | 0 | 0 | 0 | 0 | 0 | 0 | 0 |
| 788 | 0 | 0 | 0 | 0 | 0 | 0 | 0 | 0 | 0.7 | 0 | 0 | 0 | 0 | 0 | 0 | 0 | 0 | 0 | 0 | 0 | 0 |
| 789 | 0.7 | 0 | 0 | 0 | 0 | 0 | 0 | 0 | 0 | 0 | 0 | 0 | 0 | 0 | 0 | 0 | 0 | 0 | 0 | 0 | 0 |
| 790 | 0 | 0 | 0 | 0 | 0 | 0 | 0 | 0 | 0 | 0 | 0 | 0 | 0 | 0 | 0 | 0 | 0 | 0 | 0 | 0.7 | 0 |
| 791 | 0 | 0 | 0 | 0 | 0 | 0 | 0 | 0 | 0 | 0 | 0 | 0 | 0 | 0 | 0.7 | 0 | 0 | 0 | 0 | 0 | 0 |
| 792 | 0 | 0 | 0 | 0 | 0 | 0 | 0 | 0 | 0 | 0 | 1 | 0 | 0.7 | 0 | 0 | 0 | 0 | 0 | 0 | 0 | 0 |
| 793 | 0 | 0 | 0 | 0 | 0 | 0 | 0.7 | 0 | 0 | 0 | 0 | 0 | 0 | 0 | 0 | 0 | 0 | 0 | 0 | 0 | 0 |

### Example 19: Improved Activity and Expression of the SUSA from Thermosynechococcus elongatus by Computational Design

[0103] A homology model of the sucrose synthase SUSA from Thermosynechococcus elongatus was built and used as input to computational designs to improve pA21841. Computational designs were conducted to improve the stability and expression of the SuSy. forty-seven computational designs were chosen for experimental validation (SEQ ID NOs: 1181-1227). Expression plasmids for the computational designs were built as in Example 4. Each SuSy variant was expressed and purified as in Example 5. Each SuSy variant was assayed in a one-pot reaction with the B12GT, pA29798. The purified B12GT and SuSy were reacted with 100 mg/mL RA50, 250 mM Sucrose, and 0.5 mM ADP in 50 mM pH 6 phosphate buffer and 50 mM NaCl for 24 hours at 60° C. Product rebaudiosides were monitored by LCMS similar to Example 3. Several variants showed improved expression and/or Reb D conversion compared to the parent pA21841. The top designs showed up to a 2.2-fold improvement in yield or a 5.4-fold improvement in expression (34.6% conversion, 6.8 uM purified protein; Table 25).

TABLE 25
Computational Designs of pA21841

| | | Purified |
|---|---|---|
| ID | % Conversion | Conc (uM) |
| pA34126 | 75.2 | 11.7 |
| pA34103 | 73 | 9.5 |
| pA34101 | 64.3 | 9.6 |
| pA34127 | 59.9 | 9.2 |
| pA34102 | 57.7 | 8.8 |
| pA34112 | 57.2 | 4.5 |
| pA34128 | 56.2 | 8.6 |
| pA34116 | 53.4 | 13.2 |
| pA34118 | 47.9 | 17.1 |
| pA34115 | 47.5 | 3.6 |
| pA34099 | 47 | 20.6 |
| pA34117 | 46.2 | 7.2 |
| pA34131 | 45.8 | 7.1 |
| pA34125 | 45.4 | 18.3 |
| pA34121 | 45.1 | 8.3 |
| pA34134 | 43.7 | 13.3 |
| pA34086 | 42.2 | 14 |
| pA34111 | 42 | 2.2 |
| pA34113 | 40.5 | 6 |
| pA34135 | 40.3 | 13.7 |
| pA34132 | 39.6 | 9.8 |
| pA34087 | 38.2 | 5.8 |
| pA34106 | 36.8 | 14.1 |
| pA34094 | 34.4 | 14.6 |
| pA34129 | 32.4 | 10.6 |
| pA34119 | 32.1 | 23.7 |
| pA34130 | 31.7 | 5.8 |
| pA34092 | 30.7 | 10.9 |
| pA34107 | 30.2 | 15.1 |
| pA34096 | 29.7 | 2.6 |
| pA34091 | 28.5 | 13.7 |
| pA34110 | 26.6 | 25.6 |
| pA34089 | 23.5 | 26 |
| pA34088 | 22.4 | 28.6 |
| pA34122 | 22.1 | 7.8 |
| pA34109 | 21.9 | 28.4 |
| pA34120 | 21.6 | 12.2 |
| pA34097 | 15.7 | 4.2 |
| pA34133 | 15.3 | 22.9 |
| pA34095 | 13.5 | 17.9 |
| pA34105 | 12.9 | 7.8 |
| pA34090 | 12.1 | 30.7 |
| pA34123 | 7.8 | 19 |
| pA34104 | 7.7 | 36.3 |
| pA34124 | 3.3 | 17.4 |

[0104] Computational designs were also conducted to improve the stability and expression of SUSA by redesigning and repacking buried protein cores. Thirty-eight computational designs were chosen for experimental validation (SEQ ID NOs: 1231-1267). Expression plasmids for the computational designs were built as in Example 4. Each SuSy variant was expressed and purified as in Example 5. Each SuSy variant was assayed in a one-pot reaction with the B12GT, pA29798. The purified B12GT and SuSy were reacted with 100 mg/mL RA50, 250 mM Sucrose, and 0.5 mM ADP in 50 mM pH 6 phosphate buffer, and 50 mM NaCl for 24 hours at 60° C. Product rebaudiosides were monitored by LCMS similar to Example 3. Several designed enzymes expressed well and were active for Reb A to Reb D conversion (Table 26).

TABLE 26
Computational Designs of pA21841

| | | Purified |
|---|---|---|
| ID | % Conversion | Conc (uM) |
| pA35407 | 78.3 | 10.3 |
| pA35409 | 67.9 | 11.7 |
| pA35431 | 55.3 | 10.2 |
| pA35417 | 46.1 | 7.6 |
| pA35437 | 37.5 | 12.3 |
| pA35427 | 27 | 5 |
| pA35432 | 24.8 | 8.9 |
| pA35422 | 21.2 | 7.3 |
| pA35423 | 17.4 | 4.6 |
| pA35408 | 16.8 | 3.4 |
| pA35426 | 15.3 | 4 |
| pA35412 | 15.2 | 3 |
| pA35425 | 15.1 | 5.6 |
| pA35439 | 14.1 | 3.5 |
| pA35416 | 12.9 | 8.7 |
| pA35428 | 12.5 | 4.8 |
| pA35429 | 10.2 | 5.2 |
| pA35410 | 9.3 | 2.9 |
| pA35424 | 8.6 | 5.8 |
| pA35430 | 8.4 | 5.8 |
| pA35434 | 7.5 | 8.2 |
| pA35435 | 7.4 | 5.4 |
| pA35436 | 5.8 | 4.3 |
| pA35419 | 5.5 | 3 |
| pA35440 | 5.4 | 3.1 |
| pA35443 | 5.3 | 2.6 |
| pA35444 | 5.3 | 2.4 |
| pA35438 | 5.2 | 3.4 |
| pA35441 | 5.1 | 3.7 |
| pA35413 | 4.9 | 2.9 |
| pA35418 | 4.8 | 2 |
| pA35420 | 4.7 | 1.6 |
| pA35442 | 4.5 | 2.4 |
| pA35414 | 4.4 | 5 |
| pA35411 | 4.3 | 2.4 |
| pA35433 | 4.3 | 0 |
| pA35421 | 0.2 | 10.8 |

[0105] Computational designs were also conducted to improve the stability and expression of the SuSy using coevolutionary information. Sixty-five computational designs were chosen for experimental validation (SEQ ID NOs: 1268-1332). Expression plasmids for the computational designs were built as in Example 4. Each SuSy variant was expressed and purified as in Example 5. Each SuSy variant was assayed in a one-pot reaction with the B12GT, pA29798. The purified B12GT and SuSy were reacted with 100 mg/mL RA50, 250 mM Sucrose, and 0.5 mM ADP in 50 mM pH 6 phosphate buffer and 50 mM NaCl for 24 hours at 60° C. Product rebaudiosides were monitored by LCMS similar to Example 3. Several designed enzymes expressed well and were active for Reb A to Reb D conversion (Table 27).

TABLE 27
Computational Designs of pA21841

| | | Purified |
|---|---|---|
| ID | % Conversion | Conc (uM) |
| pA35907 | 83.5 | 20.3 |
| pA35928 | 82.9 | 8.5 |
| pA35903 | 71.3 | 17.1 |
| pA35933 | 71.2 | 8.9 |
| pA35901 | 68.9 | 21.4 |
| pA35932 | 68.1 | 11.3 |
| pA35938 | 66.5 | 4.5 |
| pA35882 | 65.3 | 11.2 |
| pA35942 | 64.3 | 9.7 |
| pA35897 | 60.2 | 15.8 |
| pA35943 | 57 | 8.3 |
| pA35896 | 56.8 | 21.2 |
| pA35936 | 55.4 | 5.9 |
| pA35927 | 55 | 16.1 |
| pA35926 | 49.5 | 8.4 |
| pA35929 | 49.4 | 10.1 |
| pA35891 | 48.8 | 29.6 |
| pA35898 | 47.3 | 6.6 |
| pA35895 | 47.1 | 12.9 |
| pA35937 | 46.3 | 8 |
| pA35880 | 44.1 | 7.8 |
| pA35910 | 41.1 | 13.5 |
| pA35941 | 40.6 | 8.9 |
| pA35904 | 40.5 | 11.9 |
| pA35872 | 39.4 | 7.1 |
| pA35930 | 39.1 | 6.2 |
| pA35899 | 38.6 | 22.1 |
| pA35873 | 38.5 | 11 |
| pA35935 | 36.3 | 5.3 |
| pA35905 | 34.4 | 16.5 |
| pA35902 | 33.4 | 16.3 |
| pA35911 | 32.8 | 18 |
| pA35919 | 31.4 | 9.2 |
| pA35912 | 29.7 | 6.4 |
| pA35893 | 28.1 | 23.5 |
| pA35889 | 27.7 | 6.8 |
| pA35890 | 27.1 | 20.2 |
| pA35874 | 26.5 | 8 |
| pA35886 | 25.7 | 23.7 |
| pA35888 | 24.6 | 9.2 |
| pA35875 | 24.4 | 12.1 |
| pA35908 | 24.1 | 13.6 |
| pA35892 | 23.6 | 20.4 |
| pA35887 | 23.4 | 13.9 |
| pA35879 | 22.3 | 9.6 |
| pA35931 | 19.5 | 5.9 |
| pA35915 | 19.4 | 9.8 |
| pA35940 | 18.7 | 8.8 |
| pA35914 | 18.6 | 20.9 |
| pA35876 | 18.4 | 23 |
| pA35878 | 18 | 13.4 |
| pA35921 | 17.9 | 11.7 |
| pA35881 | 16.8 | 9.1 |
| pA35877 | 13.9 | 22.6 |
| pA35923 | 13 | 28.2 |
| pA35925 | 12.1 | 13.2 |
| pA35917 | 10.3 | 12.8 |
| pA35906 | 9.1 | 7.2 |
| pA35884 | 7.8 | 18.4 |
| pA35922 | 7.6 | 6.2 |
| pA35913 | 6.7 | 3.8 |
| pA35939 | 6.4 | 5.9 |
| pA35924 | 5.7 | 7.1 |
| pA35909 | 2.1 | 10.5 |

### Example 20: Representing Successful SuSy Designs with a PSSM

[0106] The successful SuSy designs from Example 19 were used to create a PSSM (Table 28). The PSSM is a concise way to represent the successful designs and related sequences. Sequences the have a PSSM score greater than 569.5 are considered related to the active computational designs described in Example 19. To score a sequence with the generated PSSM, it must first be aligned with the representative sequence pA21841 (Seq ID No: 888). For example, the following successful designs, pA34103, pA34119, pA34099 have the following PSSM scores: 576.7, 572.5, 577.0, while the wild-type SuSy pA21841, has a PSSM score of only 565.6.

TABLE 28
Position Specific Scoring Matrix (PSSM) of Successful SuSy Designs

| Seq | Amino Acids | | | | | | | | | | | | | | | | | | | | |
|---|---|---|---|---|---|---|---|---|---|---|---|---|---|---|---|---|---|---|---|---|---|
| Pos | A | R | N | D | C | Q | E | G | H | I | L | K | M | F | P | S | T | W | Y | V | — |
| 1 | 0 | 0 | 0 | 0 | 0 | 0 | 0 | 0 | 0 | 0 | 0 | 0 | 0.7 | 0 | 0 | 0 | 0 | 0 | 0 | 0 | 0 |
| 2 | 0 | 0 | 0 | 0 | 0 | 0 | 0 | 0 | 0 | 0 | 0 | 0 | 0 | 0 | 0 | 0 | 0.7 | 0 | 0 | 0 | 0 |
| 3 | 1 | 0 | 0 | 0 | 0.7 | 0 | 0 | 0 | 0 | 0 | 0 | 0 | 0 | 0 | 0 | 1 | 0 | 0 | 0 | 0 | 0 |
| 4 | 0 | 0 | 0 | 1 | 0 | 0 | 1 | 0 | 0 | 0 | 0 | 0 | 0 | 0 | 0 | 0 | 0 | 0 | 0 | 0.7 | 0 |
| 5 | 0 | 0 | 0 | 0 | 0 | 0 | 0 | 0 | 0 | 0 | 0.7 | 0 | 0 | 0 | 0 | 0 | 0 | 0 | 0 | 0 | 0 |
| 6 | 0 | 0 | 0 | 0 | 0 | 0 | 0 | 0 | 0 | 0 | 0.7 | 0 | 0 | 0 | 0 | 0 | 0 | 0 | 0 | 0 | 0 |
| 7 | 0 | 0 | 0 | 0 | 0 | 0 | 1 | 0 | 0 | 0 | 0 | 0.7 | 0 | 0 | 0 | 0 | 0 | 0 | 0 | 0 | 0 |
| 8 | 0.7 | 0 | 0 | 0 | 0 | 0 | 0 | 0 | 0 | 0 | 0 | 0 | 0 | 0 | 0 | 1 | 0 | 0 | 0 | 0 | 0 |
| 9 | 0 | 0 | 0 | 0 | 0 | 0 | 0 | 0 | 0 | 0 | 0 | 0 | 1 | 0 | 0 | 0 | 0 | 0 | 0 | 0.7 | 0 |
| 10 | 0 | 0 | 0 | 0 | 0 | 0 | 0 | 0 | 0 | 1 | 1 | 0 | 0 | 0 | 0 | 0 | 0 | 1 | 0 | 0.7 | 0 |
| 11 | 0 | 0 | 1 | 1 | 0 | 0 | 0.7 | 0 | 0 | 0 | 0 | 0 | 0 | 0 | 0 | 0 | 0 | 0 | 0 | 0 | 0 |
| 12 | 0 | 0 | 0 | 0 | 0 | 0 | 0 | 0 | 0 | 0 | 0 | 0 | 0 | 0 | 0 | 0.7 | 0 | 0 | 0 | 0 | 0 |
| 13 | 0 | 0 | 0 | 0.7 | 0 | 0 | 1 | 0 | 0 | 0 | 0 | 0 | 0 | 0 | 0 | 0 | 0 | 0 | 0 | 0 | 0 |
| 14 | 0 | 0 | 0 | 0 | 0 | 0 | 0.7 | 0 | 1 | 0 | 0 | 0 | 0 | 0 | 0 | 0 | 0 | 0 | 0 | 0 | 0 |
| 15 | 0 | 0.7 | 0 | 0 | 0 | 0 | 0 | 0 | 0 | 0 | 0 | 1 | 0 | 0 | 0 | 0 | 0 | 0 | 0 | 0 | 0 |
| 16 | 0.7 | 0 | 1 | 0 | 0 | 0 | 1 | 0 | 0 | 0 | 0 | 0 | 0 | 0 | 0 | 0 | 1 | 0 | 0 | 0 | 0 |
| 17 | 1 | 0 | 0 | 0.7 | 0 | 0 | 0 | 0 | 0 | 0 | 0 | 0 | 0 | 0 | 0 | 0 | 0 | 0 | 0 | 0 | 0 |
| 18 | 0 | 0 | 0 | 0 | 0 | 0 | 0 | 0 | 0 | 0 | 0.7 | 0 | 0 | 0 | 0 | 0 | 0 | 0 | 0 | 0 | 0 |
| 19 | 0 | 0.7 | 0 | 0 | 0 | 0 | 0 | 0 | 1 | 0 | 0 | 0 | 0 | 0 | 0 | 0 | 0 | 0 | 0 | 0 | 0 |
| 20 | 0 | 0 | 0 | 0 | 0 | 0.7 | 0 | 0 | 0 | 0 | 0 | 0 | 0 | 0 | 0 | 0 | 0 | 0 | 0 | 0 | 0 |
| 21 | 0 | 0 | 0 | 0 | 0 | 0 | 0 | 0 | 0 | 0 | 0 | 0 | 0 | 0.7 | 0 | 0 | 0 | 0 | 0 | 0 | 0 |
| 22 | 0 | 0 | 0 | 0 | 0 | 0 | 0 | 0 | 0 | 1 | 1 | 0 | 0 | 1 | 0 | 0.7 | 0 | 0 | 0 | 0 | 0 |
| 23 | 0 | 0.7 | 0 | 0 | 0 | 0 | 0 | 0 | 0 | 0 | 0 | 0 | 0 | 0 | 0 | 0 | 0 | 0 | 0 | 0 | 0 |
| 24 | 0 | 0 | 0 | 0 | 0 | 1 | 0 | 0 | 0 | 0.7 | 1 | 0 | 0 | 0 | 0 | 0 | 0 | 0 | 1 | 0 | 0 |
| 25 | 0 | 0 | 0 | 0 | 0 | 0 | 0 | 0 | 0 | 0 | 0.7 | 0 | 0 | 0 | 0 | 0 | 0 | 0 | 0 | 0 | 0 |
| 26 | 0 | 1 | 0 | 0 | 0 | 0.7 | 0 | 0 | 0 | 0 | 0 | 0 | 0 | 0 | 0 | 0 | 0 | 0 | 0 | 0 | 0 |
| 27 | 1 | 1 | 0 | 1 | 0 | 0 | 0 | 0 | 0 | 0 | 0.7 | 0 | 0 | 0 | 0 | 0 | 1 | 0 | 0 | 0 | 0 |
| 28 | 0 | 0 | 1 | 0 | 0 | 1 | 0 | 0.7 | 0 | 0 | 0 | 0 | 0 | 0 | 0 | 1 | 0 | 0 | 0 | 0 | 0 |
| 29 | 0 | 0 | 0 | 0 | 0 | 0 | 0.7 | 1 | 0 | 0 | 0 | 0 | 0 | 0 | 0 | 0 | 0 | 0 | 0 | 0 | 0 |
| 30 | 0 | 0 | 0 | 0 | 0 | 0 | 0 | 0 | 0 | 0 | 0 | 0.7 | 0 | 0 | 0 | 0 | 0 | 0 | 0 | 0 | 0 |
| 31 | 0 | 0.7 | 0 | 0 | 0 | 0 | 0 | 1 | 0 | 0 | 0 | 0 | 0 | 0 | 0 | 0 | 0 | 0 | 0 | 0 | 0 |
| 32 | 0 | 0 | 0 | 0 | 0 | 0 | 0 | 0 | 0 | 0 | 0 | 0 | 0 | 0 | 0 | 0 | 0 | 0 | 0.7 | 0 | 0 |
| 33 | 0 | 0 | 0 | 0 | 0 | 0 | 0 | 0 | 0 | 0 | 0.7 | 0 | 0 | 1 | 0 | 0 | 0 | 0 | 0 | 0 | 0 |
| 34 | 0 | 0 | 0 | 0 | 0 | 0 | 0 | 0 | 0 | 0 | 0.7 | 0 | 0 | 0 | 0 | 0 | 0 | 0 | 0 | 0 | 0 |
| 35 | 0 | 0.7 | 0 | 0 | 0 | 0 | 0 | 0 | 0 | 0 | 0 | 0 | 0 | 0 | 0 | 0 | 0 | 0 | 0 | 0 | 0 |
| 36 | 0 | 0 | 0.7 | 0 | 0 | 0 | 0 | 0 | 0 | 0 | 0 | 0 | 0 | 0 | 0 | 0 | 0 | 0 | 0 | 0 | 0 |
| 37 | 0 | 0 | 0 | 0.7 | 0 | 0 | 1 | 0 | 0 | 0 | 0 | 0 | 0 | 0 | 0 | 0 | 0 | 0 | 0 | 0 | 0 |
| 38 | 0 | 0 | 0 | 0 | 0 | 0 | 0 | 0 | 0 | 0.7 | 0 | 0 | 0 | 0 | 0 | 0 | 0 | 0 | 0 | 0 | 0 |
| 39 | 0 | 0 | 0 | 0 | 0 | 0 | 0 | 0 | 0 | 0 | 0.7 | 0 | 0 | 0 | 0 | 0 | 0 | 0 | 0 | 0 | 0 |
| 40 | 0 | 0 | 1 | 0.7 | 0 | 1 | 0 | 1 | 0 | 0 | 0 | 0 | 0 | 0 | 0 | 0 | 0 | 0 | 0 | 0 | 0 |
| 41 | 0.7 | 0 | 0 | 0 | 0 | 0 | 0 | 0 | 0 | 0 | 0 | 0 | 0 | 0 | 0 | 0 | 0 | 0 | 0 | 0 | 0 |
| 42 | 0 | 0 | 0 | 0 | 0 | 0 | 0 | 0 | 0 | 0 | 0 | 0 | 0 | 0.7 | 0 | 0 | 0 | 0 | 0 | 0 | 0 |
| 43 | 0.7 | 0 | 0 | 0 | 0 | 0 | 1 | 0 | 1 | 0 | 0 | 0 | 0 | 0 | 0 | 0 | 0 | 0 | 0 | 0 | 0 |
| 44 | 0 | 0 | 0 | 0.7 | 0 | 0 | 1 | 0 | 0 | 0 | 0 | 0 | 0 | 0 | 0 | 0 | 0 | 0 | 0 | 0 | 0 |
| 45 | 0 | 0 | 0 | 0 | 0 | 0 | 0 | 0 | 0 | 0 | 0 | 0 | 0 | 0 | 0 | 0 | 0 | 0 | 0.7 | 0 | 0 |
| 46 | 0 | 0 | 0 | 0 | 0.7 | 0 | 0 | 0 | 0 | 0 | 0 | 0 | 0 | 0 | 0 | 0 | 0 | 0 | 0 | 0 | 0 |
| 47 | 0 | 0.7 | 0 | 0 | 0 | 0 | 0 | 0 | 1 | 0 | 0 | 0 | 0 | 0 | 0 | 0 | 0 | 0 | 0 | 0 | 0 |
| 48 | 1 | 0 | 1 | 0.7 | 0 | 0 | 0 | 0 | 0 | 0 | 0 | 0 | 0 | 0 | 0 | 0 | 0 | 0 | 0 | 0 | 0 |
| 49 | 0 | 0 | 0 | 0 | 0 | 0.7 | 0 | 0 | 0 | 0 | 1 | 1 | 0 | 0 | 0 | 0 | 0 | 0 | 0 | 0 | 0 |
| 50 | 0 | 0 | 0 | 1 | 0 | 1 | 0.7 | 1 | 0 | 0 | 0 | 0 | 0 | 0 | 0 | 0 | 0 | 0 | 0 | 0 | 0 |
| 51 | 0 | 0.7 | 0 | 0 | 0 | 0 | 0 | 0 | 0 | 0 | 0 | 1 | 0 | 0 | 0 | 0 | 0 | 0 | 0 | 0 | 0 |
| 52 | 0 | 0 | 0 | 0 | 0 | 0 | 0 | 0 | 0 | 0 | 0 | 0 | 0 | 0 | 0.7 | 0 | 0 | 0 | 0 | 0 | 0 |
| 53 | 1 | 0 | 0 | 0 | 0 | 0 | 1 | 0 | 0 | 0 | 0 | 0 | 0 | 0 | 0 | 0 | 0 | 0 | 0 | 0.7 | 0 |
| 54 | 0 | 0 | 0 | 0 | 0 | 0 | 0 | 0 | 0 | 0 | 0 | 0 | 0 | 0 | 0.7 | 0 | 0 | 0 | 1 | 0 | 0 |
| 55 | 0 | 0 | 0 | 0 | 0 | 0 | 0 | 0 | 0 | 0 | 0 | 0 | 0 | 1 | 0.7 | 0 | 1 | 0 | 0 | 0 | 0 |
| 56 | 0 | 0 | 0 | 0 | 0 | 0 | 0 | 0 | 0 | 0 | 0 | 0 | 0 | 0 | 0.7 | 0 | 0 | 0 | 1 | 0 | 0 |
| 57 | 0 | 0 | 0 | 1 | 0 | 0 | 0 | 0 | 1 | 0 | 1 | 0 | 0 | 0 | 0 | 0.7 | 0 | 0 | 0 | 0 | 0 |
| 58 | 0 | 0 | 1 | 0 | 0 | 0 | 0.7 | 0 | 0 | 0 | 0 | 0 | 0 | 0 | 0 | 1 | 0 | 0 | 0 | 0 | 0 |
| 59 | 0 | 0 | 0 | 0 | 0 | 0 | 0 | 0 | 0 | 0 | 0 | 0 | 0 | 0 | 0 | 0.7 | 0 | 0 | 0 | 0 | 0 |
| 60 | 0 | 0.7 | 0 | 0 | 0 | 0 | 0 | 1 | 0 | 0 | 0 | 0 | 0 | 0 | 0 | 0 | 0 | 0 | 0 | 0 | 0 |
| 61 | 0 | 0 | 0 | 0 | 0 | 0 | 0 | 0 | 0 | 0 | 0.7 | 0 | 0 | 0 | 0 | 0 | 0 | 0 | 0 | 0 | 0 |
| 62 | 1 | 0 | 0 | 0 | 0 | 0 | 0 | 0 | 0 | 0 | 0 | 0 | 0 | 0 | 0 | 0.7 | 0 | 1 | 0 | 0 | 0 |
| 63 | 0 | 0 | 0 | 0 | 0 | 0 | 0 | 0 | 0 | 0 | 0 | 0.7 | 0 | 0 | 0 | 0 | 0 | 0 | 0 | 0 | 0 |
| 64 | 0 | 0 | 0 | 0 | 0 | 0 | 0 | 0 | 0 | 0 | 0.7 | 0 | 0 | 0 | 0 | 0 | 0 | 0 | 0 | 0 | 0 |
| 65 | 0 | 0 | 0 | 0 | 0 | 0 | 0 | 0 | 0 | 1 | 0 | 0 | 0 | 0 | 0 | 0 | 0 | 0 | 0 | 0.7 | 0 |
| 66 | 0 | 1 | 0 | 0 | 0 | 0 | 0 | 0 | 1 | 0 | 0 | 0 | 0 | 0.7 | 0 | 0 | 0 | 0 | 1 | 0 | 0 |
| 67 | 0 | 0 | 0 | 0 | 0 | 0 | 0 | 0 | 0 | 0 | 0 | 0 | 0 | 0 | 0 | 0 | 0 | 0 | 0.7 | 0 | 0 |
| 68 | 0 | 0 | 0 | 0 | 0 | 0 | 0 | 0 | 0 | 0 | 0 | 0 | 0 | 0 | 0 | 0 | 0.7 | 0 | 0 | 0 | 0 |
| 69 | 0 | 0 | 0 | 0 | 0 | 0.7 | 0 | 0 | 0 | 0 | 0 | 0 | 0 | 0 | 0 | 0 | 0 | 0 | 0 | 0 | 0 |
| 70 | 0 | 0 | 0 | 0 | 0 | 0 | 0.7 | 0 | 0 | 0 | 0 | 0 | 0 | 0 | 0 | 0 | 0 | 0 | 0 | 0 | 0 |
| 71 | 0 | 0 | 0 | 0 | 0 | 0 | 0 | 0 | 0 | 0.7 | 0 | 0 | 0 | 0 | 0 | 0 | 0 | 0 | 0 | 0 | 0 |
| 72 | 0 | 0 | 0 | 0 | 0 | 0 | 0 | 0 | 0 | 0.7 | 0 | 0 | 0 | 0 | 0 | 0 | 0 | 0 | 0 | 0 | 0 |
| 73 | 0 | 0 | 0 | 0 | 0 | 0 | 0 | 0 | 0 | 1 | 0 | 0 | 0 | 1 | 0 | 0 | 0 | 0 | 0 | 0.7 | 0 |
| 74 | 0 | 0 | 0 | 0.7 | 0 | 0 | 0 | 0 | 0 | 0 | 0 | 0 | 0 | 0 | 0 | 0 | 0 | 0 | 0 | 0 | 0 |
| 75 | 0 | 0 | 0.7 | 1 | 0 | 0 | 1 | 0 | 0 | 0 | 0 | 0 | 0 | 0 | 0 | 0 | 0 | 0 | 0 | 0 | 0 |
| 76 | 0 | 0 | 0 | 0 | 0 | 0 | 0.7 | 0 | 0 | 0 | 0 | 0 | 0 | 0 | 0 | 0 | 0 | 0 | 0 | 0 | 0 |
| 77 | 0 | 0 | 0 | 0 | 0 | 0 | 0 | 0 | 0 | 0 | 0 | 0 | 0 | 0 | 0 | 0.7 | 0 | 1 | 0 | 0 | 0 |
| 78 | 0 | 0 | 0 | 0 | 0 | 0 | 0 | 0 | 0 | 0 | 0.7 | 0 | 0 | 0 | 0 | 0 | 0 | 0 | 0 | 0 | 0 |
| 79 | 0 | 0 | 0 | 0 | 0.7 | 0 | 0 | 0 | 0 | 0 | 0 | 0 | 0 | 0 | 0 | 0 | 0 | 1 | 0 | 0 | 0 |
| 80 | 0 | 0 | 0 | 0 | 0 | 0 | 0 | 0 | 0 | 0 | 0 | 0 | 0 | 0 | 0 | 0 | 0 | 0.7 | 0 | 0 | 0 |
| 81 | 0 | 0 | 0 | 0 | 0 | 0 | 0 | 0 | 0 | 0.7 | 0 | 0 | 0 | 0 | 0 | 0 | 0 | 0 | 0 | 0 | 0 |
| 82 | 0 | 0 | 0 | 0 | 0 | 0 | 0 | 0 | 0 | 1 | 0 | 0 | 0 | 0 | 0 | 0 | 0 | 0 | 0 | 0.7 | 0 |
| 83 | 0 | 0.7 | 0 | 0 | 0 | 0 | 0 | 0 | 0 | 0 | 0 | 0 | 0 | 0 | 0 | 0 | 0 | 0 | 0 | 0 | 0 |
| 84 | 0 | 0 | 0 | 0 | 0 | 0 | 0 | 0 | 0 | 0 | 0 | 0 | 0 | 0 | 0.7 | 0 | 0 | 0 | 0 | 0 | 0 |
| 85 | 0 | 0.7 | 0 | 0 | 0 | 1 | 0 | 0 | 0 | 0 | 0 | 1 | 0 | 0 | 0 | 0 | 0 | 0 | 0 | 0 | 0 |
| 86 | 0 | 0 | 0 | 0 | 0 | 0 | 0 | 0 | 0 | 0.7 | 0 | 0 | 0 | 0 | 0 | 0 | 0 | 0 | 0 | 0 | 0 |
| 87 | 0.7 | 0 | 0 | 0 | 0 | 0 | 0 | 0 | 0 | 0 | 0 | 0 | 0 | 0 | 0 | 0 | 0 | 0 | 0 | 0 | 0 |
| 88 | 0 | 0 | 0 | 0 | 0 | 0.7 | 0 | 0 | 0 | 0 | 0 | 0 | 0 | 0 | 0 | 0 | 0 | 0 | 0 | 0 | 0 |
| 89 | 0 | 0 | 0 | 0 | 0 | 0.7 | 0 | 0 | 0 | 0 | 0 | 0 | 0 | 0 | 0 | 0 | 0 | 0 | 0 | 0 | 0 |
| 90 | 0 | 0 | 0 | 0 | 0 | 0 | 0.7 | 0 | 0 | 0 | 0 | 0 | 0 | 0 | 0 | 0 | 0 | 0 | 0 | 0 | 0 |
| 91 | 0 | 0 | 0 | 0 | 0 | 0 | 0 | 0 | 0 | 0 | 0 | 0 | 0 | 0 | 0 | 0 | 0 | 0 | 0 | 0.7 | 0 |
| 92 | 0 | 0 | 0 | 0 | 0.7 | 0 | 0 | 0 | 0 | 0 | 0 | 0 | 0 | 0 | 0 | 0 | 0 | 1 | 1 | 1 | 0 |
| 93 | 0 | 0.7 | 0 | 0 | 0 | 0 | 0 | 0 | 0 | 0 | 0 | 0 | 0 | 0 | 0 | 0 | 0 | 0 | 0 | 0 | 0 |
| 94 | 0 | 0 | 0 | 0 | 0 | 0 | 0 | 0 | 0 | 0 | 0.7 | 0 | 0 | 0 | 0 | 0 | 0 | 0 | 0 | 0 | 0 |
| 95 | 0 | 0 | 0 | 0 | 0 | 0 | 0 | 0 | 1 | 0 | 0.7 | 0 | 0 | 0 | 0 | 0 | 0 | 0 | 0 | 0 | 0 |
| 96 | 0 | 0 | 0 | 0 | 0 | 0 | 0 | 0 | 0 | 0 | 0 | 0 | 0 | 0 | 0 | 0 | 0 | 0 | 0 | 0.7 | 0 |
| 97 | 0 | 0 | 0 | 0 | 0 | 0 | 0.7 | 0 | 0 | 0 | 0 | 0 | 0 | 0 | 0 | 0 | 0 | 0 | 0 | 0 | 0 |
| 98 | 0 | 0 | 0 | 0.7 | 0 | 0 | 0 | 0 | 0 | 0 | 0 | 0 | 0 | 0 | 0 | 0 | 0 | 0 | 0 | 0 | 0 |
| 99 | 0 | 0 | 0 | 0 | 0 | 0 | 0 | 0 | 0 | 0 | 0.7 | 0 | 1 | 0 | 0 | 0 | 0 | 0 | 0 | 0 | 0 |
| 100 | 0 | 0 | 0 | 0 | 0 | 0 | 0 | 0 | 0 | 0 | 0 | 0 | 0 | 0 | 0 | 0 | 0.7 | 0 | 0 | 0 | 0 |
| 101 | 0 | 0 | 0 | 0 | 0 | 0 | 0 | 0 | 0 | 0.7 | 0 | 0 | 0 | 1 | 0 | 0 | 0 | 0 | 0 | 1 | 0 |
| 102 | 0 | 0 | 0 | 0 | 0 | 0 | 1 | 0 | 0 | 0 | 0 | 0 | 0 | 0 | 0 | 0 | 0 | 0 | 0 | 0.7 | 0 |
| 103 | 0 | 0 | 0 | 0 | 0 | 0 | 0 | 0 | 0 | 0 | 0 | 0 | 0 | 0 | 0.7 | 0 | 0 | 0 | 0 | 0 | 0 |
| 104 | 0 | 0 | 0 | 0 | 0 | 0 | 0 | 0 | 0 | 1 | 0 | 0 | 0.7 | 0 | 0 | 0 | 0 | 0 | 0 | 0 | 0 |
| 105 | 0 | 0 | 0 | 0 | 0 | 0 | 0 | 0 | 0 | 0 | 0 | 0 | 0 | 0 | 0 | 0 | 0.7 | 0 | 0 | 0 | 0 |
| 106 | 0 | 0 | 0 | 0 | 0 | 0 | 0 | 0 | 0 | 0.7 | 0 | 0 | 0 | 0 | 0 | 0 | 0 | 0 | 0 | 0 | 0 |
| 107 | 0 | 0 | 0 | 0 | 0 | 1 | 0 | 0 | 0 | 0 | 0 | 0 | 0 | 0 | 0.7 | 0 | 0 | 0 | 0 | 0 | 0 |
| 108 | 0 | 0 | 0 | 0 | 0 | 0 | 0.7 | 0 | 0 | 0 | 0 | 0 | 0 | 0 | 0 | 0 | 0 | 0 | 0 | 0 | 0 |
| 109 | 0 | 0 | 0 | 0 | 0 | 0 | 0 | 0 | 0 | 0 | 0.7 | 0 | 0 | 0 | 0 | 0 | 0 | 0 | 0 | 0 | 0 |
| 110 | 0 | 0 | 0 | 0 | 0 | 0 | 0 | 0 | 0 | 0 | 0.7 | 0 | 0 | 0 | 0 | 0 | 0 | 0 | 0 | 0 | 0 |
| 111 | 0 | 0 | 0 | 0.7 | 0 | 0 | 0 | 0 | 0 | 0 | 0 | 0 | 0 | 0 | 0 | 0 | 0 | 0 | 0 | 0 | 0 |
| 112 | 1 | 0 | 0 | 0 | 0 | 0 | 0 | 0 | 0 | 0 | 0.7 | 0 | 0 | 1 | 0 | 0 | 0 | 0 | 0 | 0 | 0 |
| 113 | 0 | 0.7 | 0 | 0 | 0 | 0 | 0 | 0 | 0 | 0 | 0 | 0 | 0 | 0 | 0 | 0 | 0 | 0 | 0 | 0 | 0 |
| 114 | 0 | 0 | 0 | 0.7 | 0 | 0 | 0 | 0 | 0 | 0 | 0 | 0 | 0 | 0 | 0 | 0 | 0 | 0 | 0 | 0 | 0 |
| 115 | 0 | 0.7 | 0 | 0 | 0 | 0 | 0 | 0 | 0 | 0 | 0 | 0 | 0 | 0 | 0 | 0 | 0 | 0 | 0 | 0 | 0 |
| 116 | 0 | 0 | 0 | 0 | 0 | 0 | 0 | 0 | 0 | 0 | 0.7 | 0 | 0 | 0 | 0 | 0 | 0 | 0 | 0 | 0 | 0 |
| 117 | 0 | 0 | 0 | 0 | 0 | 0 | 0 | 0 | 0 | 0 | 0 | 0 | 0 | 0 | 0 | 0 | 0 | 0 | 0 | 0.7 | 0 |
| 118 | 0 | 0 | 0.7 | 0 | 0 | 0 | 0 | 0 | 0 | 0 | 0 | 0 | 0 | 0 | 0 | 0 | 0 | 0 | 0 | 0 | 0 |
| 119 | 0 | 1 | 0 | 0 | 0 | 0 | 0 | 0 | 0.7 | 0 | 0 | 0 | 0 | 0 | 0 | 0 | 0 | 0 | 0 | 0 | 0 |
| 120 | 0 | 0 | 0 | 0 | 0 | 0 | 0 | 0 | 0 | 0 | 0 | 0 | 0 | 0 | 0 | 0 | 0 | 0 | 0.7 | 0 | 0 |
| 121 | 0 | 0 | 0 | 0 | 0 | 0 | 0 | 0 | 0.7 | 0 | 0 | 0 | 0 | 0 | 0 | 0 | 0 | 0 | 0 | 0 | 0 |
| 122 | 0 | 0 | 0 | 0 | 0 | 0 | 0 | 0 | 0 | 0 | 0 | 0 | 0 | 0 | 0.7 | 0 | 0 | 0 | 0 | 0 | 0 |
| 123 | 0 | 0 | 0.7 | 0 | 0 | 0 | 0 | 0 | 0 | 0 | 0 | 0 | 0 | 0 | 0 | 0 | 0 | 0 | 0 | 0 | 0 |
| 124 | 0 | 0 | 0 | 1 | 0 | 0 | 0.7 | 0 | 0 | 0 | 0 | 0 | 0 | 0 | 0 | 0 | 0 | 0 | 0 | 0 | 0 |
| 125 | 0 | 0 | 0 | 0 | 0 | 0 | 0 | 0.7 | 0 | 0 | 0 | 0 | 0 | 0 | 0 | 0 | 0 | 0 | 0 | 0 | 0 |
| 126 | 0 | 0 | 0 | 0.7 | 0 | 0 | 0 | 0 | 0 | 0 | 0 | 0 | 0 | 0 | 0 | 0 | 0 | 0 | 0 | 0 | 0 |
| 127 | 0 | 0 | 0 | 0 | 0 | 0 | 0 | 0 | 0 | 0 | 1 | 0 | 0 | 0 | 0 | 0 | 0 | 0 | 0 | 0.7 | 0 |
| 128 | 0 | 0 | 0 | 0 | 0 | 0 | 0 | 0 | 0 | 0 | 1 | 0 | 0 | 0.7 | 0 | 0 | 0 | 0 | 0 | 0 | 0 |
| 129 | 0 | 0 | 0 | 0 | 0 | 0 | 0.7 | 0 | 0 | 0 | 0 | 0 | 0 | 0 | 0 | 0 | 0 | 0 | 0 | 0 | 0 |
| 130 | 0 | 0 | 0 | 0 | 0 | 0 | 0 | 0 | 0 | 0.7 | 1 | 0 | 0 | 0 | 0 | 0 | 0 | 0 | 0 | 0 | 0 |
| 131 | 0 | 0 | 0 | 0.7 | 0 | 0 | 0 | 0 | 0 | 0 | 0 | 0 | 0 | 0 | 0 | 0 | 0 | 0 | 0 | 0 | 0 |
| 132 | 0 | 0 | 0 | 0 | 0 | 0 | 0 | 0 | 0 | 0 | 0 | 0 | 1 | 0 | 0 | 0 | 0 | 1 | 0 | 0.7 | 0 |
| 133 | 0 | 1 | 0 | 0 | 0 | 0.7 | 1 | 0 | 0 | 0 | 0 | 0 | 0 | 0 | 0 | 0 | 0 | 0 | 0 | 0 | 0 |
| 134 | 0 | 0 | 0 | 0 | 0 | 0 | 0 | 0 | 0 | 0 | 0 | 0 | 0 | 0 | 0.7 | 0 | 0 | 0 | 0 | 0 | 0 |
| 135 | 0 | 0 | 0 | 0 | 0 | 0 | 0 | 0 | 0 | 0 | 0 | 0 | 0 | 0.7 | 0 | 0 | 0 | 0 | 0 | 0 | 0 |
| 136 | 0 | 0 | 0 | 0 | 0 | 0 | 0 | 0 | 0 | 0 | 0 | 0 | 0 | 0 | 0 | 0 | 0 | 0 | 0.7 | 0 | 0 |
| 137 | 0 | 0 | 0 | 0.7 | 0 | 0 | 0 | 0 | 0 | 0 | 0 | 0 | 0 | 0 | 0 | 0 | 0 | 0 | 0 | 0 | 0 |
| 138 | 0 | 0 | 0 | 0 | 0 | 0 | 0 | 0 | 0 | 0 | 0 | 0 | 0 | 0 | 0 | 0 | 0 | 0 | 0.7 | 0 | 0 |
| 139 | 0 | 0 | 0 | 0 | 0 | 0 | 0 | 0 | 0 | 0 | 0 | 0 | 0 | 1 | 0 | 0.7 | 0 | 0 | 0 | 0 | 0 |
| 140 | 0 | 0 | 0 | 0 | 0 | 0 | 0 | 0 | 0 | 0 | 0 | 0 | 0 | 0 | 0.7 | 0 | 0 | 0 | 0 | 0 | 0 |
| 141 | 0 | 0 | 0 | 0 | 0 | 0 | 0 | 0 | 1 | 0.7 | 0 | 1 | 0 | 0 | 0 | 0 | 0 | 0 | 0 | 1 | 0 |
| 142 | 0 | 0 | 0 | 0 | 0 | 0 | 0 | 0 | 0 | 0.7 | 0 | 0 | 0 | 0 | 0 | 0 | 0 | 0 | 0 | 0 | 0 |
| 143 | 0 | 0.7 | 0 | 0 | 0 | 0 | 0 | 0 | 0 | 0 | 0 | 0 | 0 | 0 | 0 | 0 | 0 | 0 | 0 | 0 | 0 |
| 144 | 0 | 0 | 0 | 0.7 | 0 | 0 | 0 | 0 | 0 | 0 | 0 | 0 | 0 | 0 | 0 | 0 | 0 | 0 | 0 | 0 | 0 |
| 145 | 0.7 | 0 | 0 | 0 | 0 | 0 | 0 | 0 | 0 | 0 | 0 | 0 | 0 | 0 | 1 | 0 | 0 | 0 | 0 | 0 | 0 |
| 146 | 0 | 0 | 0 | 0 | 0 | 0 | 0 | 0 | 0 | 0 | 0 | 0.7 | 0 | 0 | 0 | 0 | 0 | 0 | 0 | 0 | 0 |
| 147 | 0 | 0 | 0.7 | 0 | 0 | 0 | 0 | 0 | 0 | 0 | 0 | 0 | 0 | 0 | 0 | 0 | 0 | 0 | 0 | 0 | 0 |
| 148 | 0 | 0 | 0 | 0 | 0 | 0 | 0 | 0 | 0 | 0.7 | 0 | 0 | 0 | 0 | 0 | 0 | 0 | 0 | 0 | 0 | 0 |
| 149 | 0 | 0 | 0 | 0 | 0 | 0 | 0 | 0.7 | 0 | 0 | 0 | 0 | 0 | 0 | 0 | 0 | 0 | 0 | 0 | 0 | 0 |
| 150 | 0 | 1 | 0 | 0 | 0 | 0 | 0 | 0 | 0 | 0 | 0 | 0.7 | 0 | 0 | 0 | 0 | 0 | 0 | 0 | 0 | 0 |
| 151 | 0 | 0 | 0 | 0 | 0 | 0 | 0 | 0.7 | 0 | 0 | 0 | 0 | 0 | 0 | 0 | 0 | 0 | 0 | 0 | 0 | 0 |
| 152 | 0 | 0 | 0 | 0 | 0 | 0 | 0 | 0 | 0 | 0 | 0 | 0 | 0 | 0 | 0 | 0 | 0 | 0 | 0 | 0.7 | 0 |
| 153 | 0 | 0 | 0 | 0 | 0 | 0 | 0.7 | 0 | 0 | 0 | 0 | 0 | 0 | 0 | 0 | 0 | 0 | 0 | 0 | 0 | 0 |
| 154 | 0 | 0 | 0 | 0 | 0 | 0 | 0 | 0 | 0 | 0 | 0 | 0 | 0 | 0.7 | 0 | 0 | 0 | 0 | 0 | 0 | 0 |
| 155 | 0 | 0 | 0 | 0 | 0 | 0 | 0 | 0 | 0 | 0 | 0.7 | 0 | 0 | 0 | 0 | 0 | 0 | 0 | 0 | 0 | 0 |
| 156 | 0 | 0 | 0.7 | 0 | 0 | 0 | 0 | 0 | 0 | 0 | 0 | 0 | 0 | 0 | 0 | 0 | 0 | 0 | 0 | 0 | 0 |
| 157 | 0 | 0.7 | 0 | 0 | 0 | 0 | 0 | 0 | 0 | 0 | 0 | 0 | 0 | 0 | 0 | 0 | 0 | 0 | 0 | 0 | 0 |
| 158 | 0 | 0 | 0 | 0 | 0 | 0 | 0 | 0 | 0 | 0 | 0 | 0 | 0 | 1 | 0 | 0 | 0 | 0 | 0.7 | 0 | 0 |
| 159 | 0 | 0 | 0 | 0 | 0 | 0 | 0 | 0 | 0 | 0 | 0.7 | 0.7 | 1 | 0 | 0 | 0 | 0 | 0 | 0 | 0 | 0 |
| 160 | 0 | 0 | 0 | 0 | 0 | 0 | 0 | 0 | 0 | 0 | 0 | 0 | 0 | 0 | 0 | 0.7 | 0 | 0 | 0 | 0 | 0 |
| 161 | 0 | 0 | 0 | 0 | 0 | 0 | 0 | 0 | 0 | 0 | 0 | 0 | 0 | 0 | 0 | 0.7 | 0 | 0 | 0 | 0 | 0 |
| 162 | 0 | 0 | 0 | 0 | 0 | 0 | 0 | 0 | 0 | 0 | 0 | 0.7 | 0 | 0 | 0 | 0 | 0 | 0 | 0 | 0 | 0 |
| 163 | 1 | 0 | 0 | 0 | 0 | 0 | 0 | 0 | 0 | 0 | 0.7 | 0 | 0 | 0 | 0 | 0 | 0 | 0 | 0 | 0 | 0 |
| 164 | 0 | 0 | 0 | 0 | 0 | 0 | 0 | 0 | 0 | 0 | 0 | 0 | 0 | 0.7 | 0 | 0 | 0 | 0 | 0 | 0 | 0 |
| 165 | 0 | 0 | 0 | 0 | 0 | 0.7 | 0 | 0 | 0 | 0 | 0 | 0 | 0 | 0 | 0 | 0 | 0 | 0 | 0 | 0 | 0 |
| 166 | 0 | 0 | 0 | 0.7 | 0 | 0 | 0 | 0 | 0 | 0 | 0 | 0 | 0 | 0 | 0 | 0 | 0 | 0 | 0 | 0 | 0 |
| 167 | 0 | 0 | 0 | 0 | 0 | 0 | 0 | 0 | 0 | 0 | 0 | 0 | 0 | 0 | 0.7 | 0 | 0 | 0 | 0 | 0 | 0 |
| 168 | 0 | 0.7 | 0 | 0 | 0 | 0 | 0 | 0 | 0 | 0 | 0 | 0 | 0 | 0 | 0 | 0 | 0 | 0 | 0 | 0 | 0 |
| 169 | 0 | 0 | 0 | 0 | 0 | 0.7 | 0 | 0 | 0 | 0 | 0 | 0 | 0 | 0 | 0 | 0 | 0 | 0 | 0 | 0 | 0 |
| 170 | 0 | 0 | 0 | 0 | 0 | 0 | 0 | 1 | 0 | 0 | 0 | 0 | 0 | 0 | 0 | 0 | 0 | 0.7 | 0 | 0 | 0 |
| 171 | 0 | 0 | 0 | 0 | 0 | 0.7 | 0 | 0 | 0 | 0 | 0 | 0 | 0 | 0 | 0 | 0 | 0 | 0 | 0 | 0 | 0 |
| 172 | 0 | 0 | 0 | 0 | 0 | 0.7 | 1 | 0 | 0 | 0 | 0 | 0 | 0 | 0 | 0 | 0 | 0 | 0 | 0 | 0 | 0 |
| 173 | 1 | 1 | 0.7 | 0 | 0 | 0 | 0 | 0 | 0 | 0 | 1 | 1 | 0 | 0 | 0 | 0 | 1 | 0 | 0 | 0 | 0 |
| 174 | 0 | 0 | 0 | 0 | 0 | 0 | 0 | 0 | 0 | 0 | 0.7 | 0 | 0 | 1 | 0 | 0 | 0 | 0 | 0 | 0 | 0 |
| 175 | 0 | 0 | 0 | 0 | 0 | 0 | 0 | 0 | 0 | 0 | 1 | 0 | 0 | 0.7 | 0 | 0 | 0 | 0 | 0 | 0 | 0 |
| 176 | 0 | 0 | 0.7 | 1 | 0 | 1 | 0 | 0 | 0 | 0 | 0 | 0 | 0 | 0 | 0 | 0 | 0 | 0 | 0 | 0 | 0 |
| 177 | 0 | 0 | 0 | 0 | 0 | 0 | 0 | 0 | 0 | 0 | 0 | 0 | 0 | 0.7 | 0 | 0 | 0 | 0 | 0 | 0 | 0 |
| 178 | 0 | 0 | 0 | 0 | 0 | 0 | 0 | 0 | 0 | 0 | 0.7 | 0 | 1 | 0 | 0 | 0 | 0 | 0 | 0 | 0 | 0 |
| 179 | 0 | 0.7 | 0 | 0 | 0 | 1 | 0 | 0 | 0 | 0 | 0 | 0 | 0 | 0 | 0 | 0 | 0 | 0 | 0 | 0 | 0 |
| 180 | 0 | 0 | 0 | 0 | 0 | 0 | 0 | 0 | 0 | 0.7 | 0 | 0 | 0 | 0 | 0 | 0 | 0 | 0 | 0 | 1 | 0 |
| 181 | 0 | 0 | 0 | 0 | 0 | 0 | 0 | 0 | 0.7 | 0 | 0 | 0 | 0 | 0 | 0 | 0 | 0 | 0 | 0 | 0 | 0 |
| 182 | 0 | 0.7 | 0 | 0 | 0 | 1 | 0 | 0 | 0 | 0 | 0 | 0 | 0 | 0 | 0 | 0 | 0 | 0 | 0 | 0 | 0 |
| 183 | 0 | 0 | 0 | 0 | 0 | 0 | 0 | 0 | 0 | 0 | 0 | 0 | 0 | 0 | 0 | 0 | 0 | 0 | 0.7 | 0 | 0 |
| 184 | 0 | 0 | 0.7 | 0 | 0 | 0 | 0 | 0 | 0 | 0 | 0 | 0 | 0 | 0 | 0 | 0 | 0 | 0 | 0 | 0 | 0 |
| 185 | 0 | 0 | 0 | 0 | 0 | 0 | 0 | 0.7 | 0 | 0 | 0 | 0 | 0 | 0 | 0 | 0 | 0 | 0 | 0 | 0 | 0 |
| 186 | 0 | 0 | 0 | 0 | 0 | 1 | 0 | 0 | 0 | 1 | 0 | 0 | 0 | 0 | 0 | 0 | 0 | 0 | 0.7 | 0 | 0 |
| 187 | 0 | 0 | 0 | 0 | 0 | 0.7 | 0 | 0 | 0 | 0 | 0 | 0 | 0 | 0 | 0 | 0 | 0 | 0 | 0 | 0 | 0 |
| 188 | 0 | 0 | 0 | 0 | 0 | 0 | 0 | 0 | 0 | 0 | 0.7 | 0 | 0 | 0 | 0 | 0 | 0 | 0 | 0 | 0 | 0 |
| 189 | 0 | 0 | 0 | 0 | 0 | 0 | 0 | 1 | 0 | 0 | 0.7 | 0 | 0 | 0 | 0 | 0 | 0 | 0 | 0 | 0 | 0 |
| 190 | 0 | 0 | 0 | 0 | 0 | 0 | 0 | 0 | 0 | 0.7 | 0 | 0 | 0 | 0 | 0 | 0 | 0 | 0 | 0 | 1 | 0 |
| 191 | 0 | 0 | 0.7 | 0 | 0 | 0 | 0 | 0 | 0 | 0 | 0 | 0 | 0 | 0 | 0 | 0 | 0 | 0 | 0 | 0 | 0 |
| 192 | 0 | 0 | 0 | 1 | 0 | 0 | 0.7 | 0 | 0 | 0 | 0 | 0 | 0 | 0 | 0 | 0 | 0 | 0 | 0 | 0 | 0 |
| 193 | 0 | 0.7 | 0 | 0 | 0 | 0 | 0 | 0 | 0 | 0 | 0 | 0 | 0 | 0 | 0 | 0 | 0 | 0 | 0 | 0 | 0 |
| 194 | 0 | 0 | 0 | 0 | 0 | 0 | 0 | 0 | 0 | 0.7 | 0 | 0 | 0 | 0 | 0 | 0 | 0 | 0 | 0 | 0 | 0 |
| 195 | 0 | 0.7 | 0 | 0 | 0 | 0 | 0 | 0 | 0 | 0 | 0 | 0 | 0 | 0 | 0 | 0 | 0 | 0 | 0 | 0 | 0 |
| 196 | 0 | 0 | 1 | 0 | 0 | 0 | 0 | 0 | 0 | 0 | 0 | 0 | 0 | 0 | 0 | 0.7 | 0 | 0 | 0 | 0 | 0 |
| 197 | 0 | 0 | 0 | 0 | 0 | 0 | 0 | 0 | 0 | 0 | 0 | 0 | 0 | 0 | 0.7 | 0 | 0 | 0 | 0 | 0 | 0 |
| 198 | 0 | 0 | 0 | 0 | 0 | 0.7 | 0 | 0 | 0 | 0 | 0 | 0 | 0 | 0 | 1 | 0 | 0 | 0 | 0 | 0 | 0 |
| 199 | 0 | 0 | 0 | 0 | 0 | 1 | 0 | 0 | 0.7 | 0 | 0 | 0 | 0 | 0 | 0 | 0 | 0 | 0 | 0 | 0 | 0 |
| 200 | 0 | 0 | 0 | 0 | 0 | 0 | 0 | 0 | 0 | 0 | 0.7 | 0 | 0 | 0 | 0 | 0 | 0 | 0 | 0 | 0 | 0 |
| 201 | 1 | 0 | 0 | 0 | 0 | 0 | 0 | 0 | 0 | 0 | 0 | 0 | 1 | 0 | 0 | 0.7 | 0 | 0 | 0 | 0 | 0 |
| 202 | 0 | 0 | 0 | 0 | 0 | 0 | 0.7 | 0 | 0 | 0 | 0 | 0 | 0 | 0 | 0 | 0 | 0 | 0 | 0 | 0 | 0 |
| 203 | 0 | 0 | 0 | 0 | 0 | 0.7 | 0 | 0 | 0 | 0 | 0 | 0 | 0 | 0 | 0 | 0 | 0 | 0 | 0 | 0 | 0 |
| 204 | 0 | 0 | 0 | 0 | 0 | 0 | 0 | 0 | 0 | 1 | 0 | 0 | 0 | 0 | 0 | 0 | 0 | 0 | 0 | 0.7 | 0 |
| 205 | 0 | 0 | 0 | 0 | 0 | 0 | 0 | 0 | 0 | 0 | 0 | 0.7 | 0 | 0 | 0 | 0 | 0 | 0 | 0 | 0 | 0 |
| 206 | 0 | 0 | 0 | 0 | 0 | 0.7 | 0 | 0 | 0 | 0 | 0 | 0 | 0 | 0 | 0 | 0 | 0 | 0 | 0 | 0 | 0 |
| 207 | 0.7 | 0 | 0 | 0 | 0 | 0 | 0 | 0 | 0 | 0 | 0 | 0 | 0 | 0 | 0 | 0 | 0 | 0 | 0 | 0 | 0 |
| 208 | 0 | 0 | 0 | 0 | 0 | 0 | 0 | 0 | 0 | 0 | 0.7 | 0 | 0 | 0 | 0 | 0 | 0 | 0 | 0 | 0 | 0 |
| 209 | 0 | 0 | 0 | 0 | 0 | 0 | 0 | 0 | 0 | 0 | 0 | 1 | 0 | 0 | 0 | 0 | 0 | 0 | 0 | 0.7 | 0 |
| 210 | 1 | 0 | 0 | 0 | 0 | 0 | 0 | 0 | 0 | 0 | 0 | 0 | 0 | 1 | 0 | 0 | 1 | 1 | 1 | 0.7 | 0 |
| 211 | 0 | 0 | 0 | 0 | 0 | 0 | 0 | 0 | 0 | 0 | 0.7 | 0 | 0 | 0 | 0 | 0 | 0 | 0 | 0 | 0 | 0 |
| 212 | 0 | 0 | 0 | 0 | 0 | 0 | 0 | 0 | 0 | 0 | 0 | 0 | 0 | 0 | 0 | 0.7 | 0 | 0 | 0 | 0 | 0 |
| 213 | 0 | 0 | 0 | 0.7 | 0 | 0 | 0 | 0 | 0 | 0 | 0 | 0 | 0 | 0 | 0 | 0 | 0 | 0 | 0 | 0 | 0 |
| 214 | 0 | 0.7 | 0 | 0 | 0 | 1 | 0 | 0 | 0 | 0 | 0 | 0 | 0 | 0 | 0 | 0 | 0 | 0 | 0 | 0 | 0 |
| 215 | 1 | 0 | 0 | 0 | 0 | 0 | 0 | 0 | 0 | 0 | 0 | 0 | 0 | 0 | 0.7 | 0 | 0 | 0 | 0 | 0 | 0 |
| 216 | 0 | 0 | 0 | 0 | 0 | 0 | 0 | 0 | 0 | 0 | 0 | 0 | 0 | 0 | 0.7 | 1 | 0 | 0 | 0 | 0 | 0 |
| 217 | 1 | 0 | 0 | 1 | 0 | 0 | 0 | 0 | 0 | 0 | 0 | 0 | 0 | 0 | 0 | 0 | 0.7 | 0 | 0 | 0 | 0 |
| 218 | 1 | 0 | 0 | 0 | 0 | 0 | 0.7 | 0 | 0 | 0 | 0 | 0 | 0 | 0 | 0 | 0 | 0 | 0 | 0 | 0 | 0 |
| 219 | 0.7 | 0 | 0 | 0 | 0 | 0 | 0 | 0 | 0 | 0 | 0 | 0 | 0 | 0 | 1 | 0 | 0 | 0 | 0 | 0 | 0 |
| 220 | 0 | 0 | 0 | 0 | 0 | 0 | 0 | 0 | 0 | 0 | 0 | 0 | 0 | 1 | 0 | 0 | 0 | 0 | 0.7 | 0 | 0 |
| 221 | 0 | 0 | 0 | 0 | 0 | 1 | 1 | 0 | 0 | 0 | 0 | 0 | 0 | 0 | 0 | 0.7 | 0 | 0 | 0 | 0 | 0 |
| 222 | 0 | 0 | 0 | 0 | 0 | 0 | 0.7 | 0 | 0 | 0 | 0 | 0 | 0 | 0 | 0 | 0 | 0 | 0 | 0 | 0 | 0 |
| 223 | 0 | 0 | 0 | 0 | 0 | 0 | 0 | 0 | 0 | 0 | 0 | 0 | 0 | 0.7 | 0 | 0 | 0 | 0 | 0 | 0 | 0 |
| 224 | 0 | 0.7 | 0 | 0 | 0 | 0 | 0 | 0 | 0 | 0 | 0 | 0 | 0 | 0 | 0 | 0 | 0 | 0 | 0 | 0 | 0 |
| 225 | 0 | 0 | 0 | 0 | 0 | 0 | 0 | 0 | 0 | 0 | 0 | 0 | 0 | 0.7 | 0 | 0 | 0 | 0 | 0 | 0 | 0 |
| 226 | 0 | 0 | 0 | 0 | 0 | 0 | 0.7 | 0 | 0 | 0 | 0 | 0 | 0 | 0 | 0 | 0 | 0 | 0 | 0 | 0 | 0 |
| 227 | 0 | 0 | 0 | 0 | 0 | 0 | 0 | 0 | 0 | 0 | 0.7 | 0 | 0 | 0 | 0 | 0 | 0 | 0 | 0 | 0 | 0 |
| 228 | 0 | 0 | 0 | 0 | 0 | 0.7 | 0 | 0 | 0 | 0 | 0 | 0 | 0 | 0 | 0 | 0 | 0 | 0 | 0 | 0 | 0 |
| 229 | 0 | 0 | 0.7 | 0 | 0 | 0 | 1 | 0 | 0 | 0 | 0 | 0 | 0 | 0 | 0 | 0 | 0 | 0 | 0 | 0 | 0 |
| 230 | 0 | 0 | 0 | 0 | 0 | 0 | 0 | 0 | 0 | 0 | 0.7 | 0 | 0 | 0 | 0 | 0 | 0 | 0 | 0 | 0 | 0 |
| 231 | 0 | 0 | 0 | 0 | 0 | 0 | 0 | 0.7 | 0 | 0 | 0 | 0 | 0 | 0 | 0 | 0 | 0 | 0 | 0 | 0 | 0 |
| 232 | 0 | 0 | 0 | 0 | 0 | 0 | 0 | 0 | 0 | 0 | 0 | 0 | 0 | 0.7 | 0 | 0 | 0 | 0 | 0 | 0 | 0 |
| 233 | 0 | 0 | 0 | 0 | 0 | 0 | 0.7 | 0 | 0 | 0 | 0 | 0 | 0 | 0 | 0 | 0 | 0 | 0 | 0 | 0 | 0 |
| 234 | 0 | 0 | 0 | 0 | 0 | 0 | 0 | 0 | 0 | 0 | 0 | 0 | 0 | 0 | 0.7 | 0 | 0 | 0 | 0 | 0 | 0 |
| 235 | 0 | 0 | 0 | 0 | 0 | 0 | 0 | 0.7 | 0 | 0 | 0 | 0 | 0 | 0 | 0 | 0 | 0 | 0 | 0 | 0 | 0 |
| 236 | 0 | 0 | 0 | 0 | 0 | 0 | 0 | 0 | 0 | 0 | 1 | 0 | 0 | 0 | 0 | 0 | 0 | 0.7 | 0 | 0 | 0 |
| 237 | 0 | 0 | 0 | 0 | 0 | 0 | 0 | 0.7 | 0 | 0 | 0 | 0 | 0 | 0 | 0 | 0 | 0 | 0 | 0 | 0 | 0 |
| 238 | 0 | 1 | 0.7 | 0 | 0 | 0 | 0 | 0 | 0 | 0 | 0 | 1 | 0 | 0 | 0 | 0 | 0 | 0 | 0 | 0 | 0 |
| 239 | 0 | 0 | 0 | 0 | 0 | 0 | 0 | 0 | 0 | 0 | 0 | 0 | 0 | 0 | 0 | 0 | 0.7 | 0 | 0 | 0 | 0 |
| 240 | 1 | 0 | 0 | 0 | 0 | 0 | 0 | 0 | 0 | 0 | 0 | 0 | 0 | 0 | 0 | 0 | 0 | 0 | 0 | 0.7 | 0 |
| 241 | 0.7 | 0 | 0 | 0 | 0 | 0 | 0 | 0 | 0 | 0 | 0 | 0 | 0 | 0 | 0 | 0 | 0 | 0 | 0 | 0 | 0 |
| 242 | 0 | 0.7 | 0 | 0 | 0 | 0 | 0 | 0 | 0 | 0 | 0 | 0 | 0 | 0 | 0 | 0 | 0 | 0 | 0 | 0 | 0 |
| 243 | 0 | 0 | 0 | 0 | 0 | 0 | 0 | 0 | 0 | 0 | 0 | 0 | 0 | 0 | 0 | 0 | 0 | 0 | 0 | 0.7 | 0 |
| 244 | 0 | 0.7 | 0 | 0 | 0 | 0 | 0 | 0 | 0 | 0 | 0 | 0 | 0 | 0 | 0 | 0 | 0 | 0 | 0 | 0 | 0 |
| 245 | 0 | 0 | 0 | 0.7 | 0 | 0 | 1 | 0 | 0 | 0 | 0 | 0 | 0 | 0 | 0 | 0 | 0 | 0 | 0 | 0 | 0 |
| 246 | 0 | 0 | 0 | 0 | 0 | 0 | 0 | 0 | 0 | 0 | 0 | 0 | 0 | 0 | 0 | 0 | 0.7 | 0 | 0 | 0 | 0 |
| 247 | 0 | 0 | 0 | 0 | 0 | 0 | 0 | 0 | 0 | 0 | 0.7 | 0 | 0 | 0 | 0 | 0 | 0 | 0 | 0 | 0 | 0 |
| 248 | 0 | 0 | 0 | 0 | 0 | 0 | 0.7 | 0 | 0 | 0 | 0 | 0 | 0 | 0 | 0 | 0 | 0 | 0 | 0 | 0 | 0 |
| 249 | 0 | 0 | 0 | 0 | 0 | 0 | 0 | 0 | 0 | 0.7 | 1 | 0 | 0 | 0 | 0 | 0 | 0 | 0 | 0 | 0 | 0 |
| 250 | 0 | 0 | 0 | 0 | 0 | 0 | 0 | 0 | 0 | 1 | 0.7 | 0 | 1 | 0 | 0 | 0 | 0 | 0 | 0 | 0 | 0 |
| 251 | 1 | 0 | 0 | 0.7 | 0 | 0 | 0 | 0 | 0 | 0 | 1 | 0 | 0 | 0 | 0 | 0 | 0 | 0 | 0 | 0 | 0 |
| 252 | 0 | 0 | 0 | 0 | 0 | 0.7 | 0 | 0 | 0 | 0 | 0 | 0 | 0 | 0 | 0 | 0 | 0 | 0 | 0 | 0 | 0 |
| 253 | 1 | 0 | 0 | 0 | 0 | 0 | 0 | 0 | 0 | 0 | 0.7 | 0 | 0 | 0 | 0 | 0 | 0 | 0 | 0 | 1 | 0 |
| 254 | 1 | 0 | 0 | 0 | 0 | 0 | 0 | 0 | 0 | 1 | 0.7 | 0 | 1 | 0 | 0 | 0 | 0 | 0 | 0 | 0 | 0 |
| 255 | 0 | 0 | 0 | 0.7 | 0 | 0 | 0 | 0 | 0 | 0 | 0 | 0 | 0 | 0 | 0 | 0 | 0 | 0 | 0 | 0 | 0 |
| 256 | 0 | 0 | 0 | 0 | 0 | 0 | 0 | 0 | 0 | 0 | 0 | 0 | 0 | 0 | 0 | 0.7 | 0 | 0 | 0 | 0 | 0 |
| 257 | 0 | 0 | 0 | 0 | 0 | 0 | 0 | 0 | 0 | 0 | 0 | 0 | 0 | 0 | 0.7 | 0 | 0 | 0 | 0 | 0 | 0 |
| 258 | 0 | 0 | 0 | 0.7 | 0 | 0 | 0 | 0 | 0 | 0 | 0 | 0 | 0 | 0 | 0 | 0 | 0 | 0 | 0 | 0 | 0 |
| 259 | 0 | 0 | 0 | 0 | 0 | 0 | 0 | 0 | 0.7 | 0 | 0 | 0 | 0 | 0 | 0 | 0 | 0 | 0 | 0 | 0 | 0 |
| 260 | 0 | 0 | 0 | 0 | 0 | 0.7 | 0 | 0 | 0 | 0 | 0 | 0 | 0 | 0 | 0 | 0 | 0 | 0 | 0 | 0 | 0 |
| 261 | 0 | 0 | 0 | 0 | 0 | 0 | 0 | 0 | 0 | 0 | 0 | 0 | 0 | 0 | 0 | 0 | 0 | 0 | 0 | 0.7 | 0 |
| 262 | 0 | 0 | 0 | 0 | 0 | 0 | 0 | 0 | 0 | 0 | 0.7 | 0 | 0 | 0 | 0 | 0 | 0 | 0 | 0 | 0 | 0 |
| 263 | 0 | 0 | 0 | 0 | 0 | 0 | 0.7 | 0 | 0 | 0 | 0 | 0 | 0 | 0 | 0 | 0 | 0 | 0 | 0 | 0 | 0 |
| 264 | 0.7 | 0 | 0 | 0 | 0 | 0 | 0 | 0 | 0 | 0 | 0 | 0 | 0 | 0 | 0 | 0 | 0 | 0 | 0 | 0 | 0 |
| 265 | 0 | 0 | 0 | 0 | 0 | 0 | 0 | 0 | 0 | 0 | 1 | 0 | 0 | 0.7 | 0 | 0 | 0 | 0 | 0 | 0 | 0 |
| 266 | 0 | 0 | 0 | 0 | 0 | 0 | 0 | 0 | 0 | 0 | 1 | 0 | 0 | 1 | 0 | 0 | 0 | 0 | 0 | 0.7 | 0 |
| 267 | 0 | 0 | 0 | 0 | 0 | 0 | 0 | 0 | 0 | 0 | 0 | 0 | 0 | 0 | 0 | 0.7 | 0 | 0 | 0 | 0 | 0 |
| 268 | 0 | 0.7 | 0 | 0 | 0 | 0 | 0 | 0 | 0 | 0 | 0 | 0 | 0 | 0 | 0 | 0 | 0 | 0 | 0 | 0 | 0 |
| 269 | 0 | 0 | 0 | 0 | 0 | 0 | 0 | 0 | 0 | 0.7 | 0 | 0 | 0 | 0 | 0 | 0 | 0 | 0 | 0 | 0 | 0 |
| 270 | 0 | 0 | 0 | 0 | 0 | 0 | 0 | 0 | 0 | 0 | 0 | 0 | 0 | 0 | 0.7 | 0 | 0 | 0 | 0 | 0 | 0 |
| 271 | 0 | 0 | 0 | 0 | 0 | 0 | 0 | 0 | 0 | 0 | 0 | 0 | 0.7 | 0 | 0 | 0 | 0 | 0 | 0 | 0 | 0 |
| 272 | 0 | 0 | 0 | 0 | 0 | 0 | 0 | 0 | 0 | 1 | 0.7 | 0 | 0 | 0 | 0 | 0 | 0 | 0 | 0 | 0 | 0 |
| 273 | 0 | 0 | 0 | 0 | 0 | 0 | 0 | 0 | 0 | 0 | 0 | 0 | 0 | 0.7 | 0 | 0 | 0 | 0 | 0 | 0 | 0 |
| 274 | 0 | 0.7 | 0 | 0 | 0 | 0 | 0 | 0 | 0 | 0 | 0 | 0 | 0 | 0 | 0 | 0 | 0 | 0 | 0 | 0 | 0 |
| 275 | 0 | 0 | 0 | 0 | 0 | 0 | 0 | 0 | 0 | 0.7 | 0 | 0 | 0 | 0 | 0 | 0 | 0 | 0 | 0 | 1 | 0 |
| 276 | 0.7 | 0 | 0 | 0 | 0 | 0 | 0 | 0 | 0 | 0 | 1 | 0 | 0 | 0 | 0 | 0 | 0 | 0 | 0 | 1 | 0 |
| 277 | 0 | 0 | 0 | 0 | 0 | 0 | 0 | 0 | 0 | 1 | 0.7 | 0 | 0 | 0 | 0 | 0 | 0 | 0 | 0 | 0 | 0 |
| 278 | 0 | 0 | 0 | 0 | 0 | 0 | 0 | 0 | 0 | 0.7 | 0 | 0 | 0 | 0 | 0 | 0 | 0 | 0 | 0 | 1 | 0 |
| 279 | 0 | 0 | 0 | 0 | 0 | 0 | 0 | 0 | 0 | 0 | 0 | 0 | 0 | 0 | 0 | 0.7 | 0 | 0 | 0 | 0 | 0 |
| 280 | 1 | 0 | 0 | 0 | 0 | 0 | 0 | 0 | 0 | 0 | 0 | 0 | 0 | 0 | 0.7 | 0 | 0 | 0 | 0 | 0 | 0 |
| 281 | 0 | 0 | 0 | 0 | 0 | 0 | 0 | 0 | 0.7 | 0 | 0 | 0 | 0 | 0 | 0 | 0 | 0 | 0 | 0 | 0 | 0 |
| 282 | 0 | 0 | 0 | 0 | 0 | 0 | 0 | 0.7 | 0 | 0 | 0 | 0 | 0 | 0 | 0 | 0 | 0 | 0 | 0 | 0 | 0 |
| 283 | 0 | 0 | 0 | 0 | 0 | 0 | 0 | 0 | 0 | 0 | 0 | 0 | 0 | 0 | 0 | 0 | 0 | 0.7 | 0 | 0 | 0 |
| 284 | 0 | 0 | 0 | 0 | 0 | 0 | 0 | 0 | 0 | 0 | 0 | 0 | 0 | 0.7 | 0 | 0 | 0 | 0 | 0 | 0 | 0 |
| 285 | 0 | 0 | 0 | 0 | 0 | 0 | 0 | 0.7 | 0 | 0 | 0 | 0 | 0 | 0 | 0 | 0 | 0 | 0 | 0 | 0 | 0 |
| 286 | 0 | 0 | 0 | 0 | 0 | 0.7 | 0 | 0 | 0 | 0 | 0 | 0 | 0 | 0 | 0 | 0 | 0 | 0 | 0 | 0 | 0 |
| 287 | 0 | 0 | 0 | 0 | 0 | 0 | 0.7 | 0 | 0 | 0 | 0 | 0 | 0 | 0 | 0 | 0 | 0 | 0 | 0 | 0 | 0 |
| 288 | 0 | 0 | 1 | 0 | 0 | 0 | 0 | 0.7 | 0 | 0 | 0 | 0 | 0 | 0 | 0 | 0 | 0 | 0 | 0 | 0 | 0 |
| 289 | 0 | 0 | 0 | 0 | 0 | 0 | 0 | 0 | 0 | 0 | 0 | 0 | 0 | 0 | 0 | 0 | 0 | 0 | 0 | 0.7 | 0 |
| 290 | 0 | 0 | 0 | 0 | 0 | 0 | 0 | 0 | 0 | 0 | 0.7 | 0 | 0 | 0 | 0 | 0 | 0 | 0 | 0 | 0 | 0 |
| 291 | 0 | 0 | 0 | 0 | 0 | 0 | 0 | 0.7 | 0 | 0 | 0 | 0 | 0 | 0 | 0 | 0 | 0 | 0 | 0 | 0 | 0 |
| 292 | 0 | 0.7 | 0 | 0 | 0 | 0 | 0 | 0 | 0 | 0 | 0 | 0 | 0 | 0 | 0 | 0 | 0 | 0 | 0 | 0 | 0 |
| 293 | 0 | 0 | 0 | 0 | 0 | 0 | 0 | 0 | 0 | 0 | 0 | 0 | 0 | 0 | 0.7 | 0 | 0 | 0 | 0 | 0 | 0 |
| 294 | 0 | 0 | 0 | 0.7 | 0 | 0 | 0 | 0 | 0 | 0 | 0 | 0 | 0 | 0 | 0 | 0 | 0 | 0 | 0 | 0 | 0 |
| 295 | 0 | 0 | 0 | 0 | 0 | 0 | 0 | 0 | 0 | 0 | 0 | 0 | 0 | 0 | 0 | 0 | 0.7 | 0 | 0 | 0 | 0 |
| 296 | 0 | 0 | 0 | 0 | 0 | 0 | 0 | 0.7 | 0 | 0 | 0 | 0 | 0 | 0 | 0 | 0 | 0 | 0 | 0 | 0 | 0 |
| 297 | 0 | 0 | 0 | 0 | 0 | 0 | 0 | 0.7 | 0 | 0 | 0 | 0 | 0 | 0 | 0 | 0 | 0 | 0 | 0 | 0 | 0 |
| 298 | 0 | 0 | 0 | 0 | 0 | 0.7 | 0 | 0 | 0 | 0 | 0 | 0 | 0 | 0 | 0 | 0 | 0 | 0 | 0 | 0 | 0 |
| 299 | 0 | 0 | 0 | 0 | 0 | 0 | 0 | 0 | 0 | 0 | 0 | 0 | 0 | 0 | 0 | 0 | 0 | 0 | 0 | 0.7 | 0 |
| 300 | 0 | 0 | 0 | 0 | 0 | 0 | 0 | 0 | 0 | 0 | 0 | 0 | 0 | 0 | 0 | 0 | 0 | 0 | 0 | 0.7 | 0 |
| 301 | 0 | 0 | 0 | 0 | 0 | 0 | 0 | 0 | 0 | 0 | 1 | 0 | 0 | 0 | 0 | 0 | 0 | 0 | 0.7 | 0 | 0 |
| 302 | 0 | 0 | 0 | 0 | 0 | 0 | 0 | 0 | 0 | 0.7 | 0 | 0 | 0 | 0 | 0 | 0 | 0 | 0 | 0 | 0 | 0 |
| 303 | 0 | 0 | 0 | 0 | 0 | 0 | 0 | 0 | 0 | 0 | 0.7 | 0 | 0 | 0 | 0 | 0 | 0 | 0 | 0 | 0 | 0 |
| 304 | 0 | 0 | 0 | 0.7 | 0 | 0 | 0 | 0 | 0 | 0 | 0 | 0 | 0 | 0 | 0 | 0 | 0 | 0 | 0 | 0 | 0 |
| 305 | 0 | 0 | 0 | 0 | 0 | 0.7 | 0 | 0 | 0 | 0 | 0 | 0 | 0 | 0 | 0 | 0 | 0 | 0 | 0 | 0 | 0 |
| 306 | 1 | 0 | 0 | 0 | 0 | 0 | 0 | 0 | 0 | 0 | 0 | 0 | 0 | 0 | 0 | 0 | 0 | 0 | 0 | 0.7 | 0 |
| 307 | 0 | 1 | 0 | 0 | 0 | 1 | 0 | 0 | 0 | 0 | 0 | 0.7 | 0 | 0 | 0 | 0 | 0 | 0 | 0 | 0 | 0 |
| 308 | 1 | 0 | 1 | 0 | 0 | 0 | 0 | 0 | 0 | 0 | 0 | 0 | 0 | 0 | 0 | 0.7 | 0 | 0 | 0 | 0 | 0 |
| 309 | 0 | 0 | 0 | 0 | 0 | 0 | 0 | 0 | 0 | 0 | 0.7 | 0 | 0 | 0 | 0 | 0 | 0 | 0 | 0 | 0 | 0 |
| 310 | 0 | 0 | 0 | 0 | 0 | 0 | 0.7 | 0 | 0 | 0 | 0 | 0 | 0 | 0 | 0 | 0 | 0 | 0 | 0 | 0 | 0 |
| 311 | 0 | 1 | 0 | 0 | 0 | 0 | 0 | 0 | 0 | 0 | 0 | 0.7 | 0 | 0 | 0 | 0 | 0 | 0 | 0 | 0 | 0 |
| 312 | 0 | 0 | 0 | 0 | 0 | 0.7 | 0 | 0 | 0 | 0 | 0 | 0 | 0 | 0 | 0 | 0 | 0 | 0 | 0 | 0 | 0 |
| 313 | 0 | 0 | 0 | 0 | 0 | 0 | 0 | 0 | 0 | 0 | 1 | 0 | 0.7 | 0 | 0 | 0 | 0 | 0 | 0 | 0 | 0 |
| 314 | 0 | 0.7 | 0 | 0 | 0 | 1 | 0 | 0 | 0 | 0 | 0 | 0 | 0 | 0 | 0 | 0 | 0 | 0 | 0 | 0 | 0 |
| 315 | 0 | 0 | 0 | 0 | 0 | 0 | 0.7 | 0 | 0 | 0 | 0 | 0 | 0 | 0 | 0 | 0 | 0 | 0 | 0 | 0 | 0 |
| 316 | 0 | 0 | 0 | 0.7 | 0 | 0 | 0 | 0 | 0 | 0 | 0 | 0 | 0 | 0 | 0 | 0 | 0 | 0 | 0 | 0 | 0 |
| 317 | 0 | 0 | 0 | 0 | 0 | 0 | 0 | 0 | 0 | 1 | 0.7 | 0 | 0 | 0 | 0 | 0 | 0 | 0 | 0 | 0 | 0 |
| 318 | 0 | 0 | 0 | 0 | 0 | 1 | 0.7 | 0 | 0 | 0 | 0 | 1 | 0 | 0 | 0 | 0 | 0 | 0 | 0 | 0 | 0 |
| 319 | 0 | 0 | 0 | 0 | 0 | 0 | 1 | 0 | 0 | 0 | 0.7 | 0 | 0 | 0 | 0 | 0 | 0 | 0 | 0 | 0 | 0 |
| 320 | 0.7 | 0 | 0 | 0 | 0 | 0 | 0 | 0 | 0 | 0 | 0 | 0 | 0 | 0 | 0 | 0 | 0 | 0 | 0 | 0 | 0 |
| 321 | 0 | 0 | 0 | 0 | 0 | 0 | 0 | 0.7 | 0 | 0 | 0 | 0 | 0 | 0 | 0 | 0 | 0 | 0 | 0 | 0 | 0 |
| 322 | 0 | 0 | 0 | 0 | 0 | 0 | 0 | 0 | 0 | 0 | 0.7 | 0 | 0 | 0 | 0 | 0 | 0 | 0 | 0 | 0 | 0 |
| 323 | 0 | 0 | 0 | 1 | 0 | 0 | 1 | 0.7 | 0 | 0 | 0 | 0 | 0 | 0 | 0 | 0 | 0 | 0 | 0 | 0 | 0 |
| 324 | 0 | 0 | 0 | 0 | 0 | 0 | 0 | 0 | 0 | 0 | 0 | 0 | 0 | 0 | 0 | 0 | 0 | 1 | 0 | 0.7 | 0 |
| 325 | 0 | 0 | 0 | 0 | 0 | 0 | 0 | 0 | 0 | 0 | 0.7 | 0 | 0 | 0 | 0 | 0 | 0 | 0 | 0 | 0 | 0 |
| 326 | 0 | 0 | 0 | 0 | 0 | 0 | 0.7 | 0 | 0 | 0 | 0 | 0 | 0 | 0 | 0 | 0 | 0 | 0 | 0 | 0 | 0 |
| 327 | 0.7 | 0 | 0 | 0 | 0 | 0 | 0 | 0 | 0 | 1 | 0 | 0 | 0 | 0 | 0 | 0 | 0 | 0 | 0 | 0 | 0 |
| 328 | 0 | 1 | 0 | 0 | 0 | 0.7 | 0 | 0 | 0 | 0 | 0 | 0 | 0 | 0 | 0 | 0 | 0 | 0 | 0 | 0 | 0 |
| 329 | 0 | 0 | 0 | 0 | 0 | 0 | 0 | 0 | 0 | 0 | 0 | 0 | 0 | 0 | 0.7 | 0 | 0 | 0 | 0 | 0 | 0 |
| 330 | 0 | 0 | 0 | 0 | 0 | 0 | 0 | 0 | 0 | 0 | 0 | 0.7 | 0 | 0 | 0 | 0 | 0 | 0 | 0 | 0 | 0 |
| 331 | 0 | 0 | 0 | 0 | 0 | 0 | 0 | 0 | 0 | 0.7 | 0 | 0 | 0 | 0 | 0 | 0 | 0 | 0 | 0 | 0 | 0 |
| 332 | 0 | 0 | 0 | 0 | 0 | 0 | 0 | 0 | 0 | 0.7 | 0 | 0 | 0 | 0 | 0 | 0 | 0 | 0 | 0 | 0 | 0 |
| 333 | 0 | 0 | 0 | 0 | 0 | 0 | 0 | 0 | 0 | 1 | 0 | 0 | 0 | 0 | 0 | 0 | 0 | 0 | 0 | 0.7 | 0 |
| 334 | 0 | 0 | 0 | 0 | 0 | 0 | 0 | 0 | 0 | 0 | 0.7 | 0 | 0 | 0 | 0 | 0 | 0 | 0 | 0 | 0 | 0 |
| 335 | 0 | 0 | 0 | 0 | 0 | 0 | 0 | 0 | 0 | 0 | 0 | 0 | 0 | 0 | 0 | 0 | 0.7 | 0 | 0 | 0 | 0 |
| 336 | 0 | 0.7 | 0 | 0 | 0 | 0 | 0 | 0 | 0 | 0 | 0 | 0 | 0 | 0 | 0 | 0 | 0 | 0 | 0 | 0 | 0 |
| 337 | 0 | 0 | 0 | 0 | 0 | 0 | 0 | 0 | 0 | 0 | 0.7 | 0 | 0 | 0 | 0 | 0 | 0 | 0 | 0 | 0 | 0 |
| 338 | 0 | 0 | 0 | 0 | 0 | 0 | 0 | 0 | 0 | 0.7 | 0 | 0 | 0 | 0 | 0 | 0 | 0 | 0 | 0 | 0 | 0 |
| 339 | 0 | 0 | 0 | 0 | 0 | 0 | 0 | 0 | 0 | 0 | 0 | 0 | 0 | 0 | 0.7 | 0 | 0 | 0 | 0 | 0 | 0 |
| 340 | 0 | 0 | 0.7 | 0 | 0 | 0 | 0 | 0 | 0 | 0 | 0 | 0 | 0 | 0 | 0 | 0 | 0 | 0 | 0 | 0 | 0 |
| 341 | 0.7 | 0 | 0 | 0 | 1 | 0 | 0 | 0 | 0 | 0 | 0 | 0 | 0 | 0 | 0 | 1 | 0 | 0 | 0 | 0 | 0 |
| 342 | 0 | 0 | 0 | 0 | 0 | 0 | 0.7 | 0 | 0 | 0 | 0 | 0 | 0 | 0 | 0 | 0 | 0 | 0 | 0 | 0 | 0 |
| 343 | 0 | 0 | 0 | 0 | 0 | 0 | 0 | 0.7 | 0 | 0 | 0 | 0 | 0 | 0 | 0 | 0 | 0 | 0 | 0 | 0 | 0 |
| 344 | 0 | 0 | 0 | 0 | 0 | 0 | 0 | 0 | 0 | 0 | 0 | 0 | 0 | 0 | 0 | 0 | 0.7 | 0 | 0 | 0 | 0 |
| 345 | 0 | 1 | 0 | 0 | 0 | 0 | 0 | 0 | 0 | 0 | 0.7 | 0 | 0 | 0 | 0 | 0 | 1 | 0 | 0 | 0 | 0 |
| 346 | 0 | 0 | 0 | 0 | 0.7 | 0 | 0 | 0 | 0 | 0 | 0 | 0 | 0 | 0 | 0 | 0 | 0 | 0 | 0 | 0 | 0 |
| 347 | 0 | 0 | 0.7 | 0 | 0 | 0 | 0 | 0 | 0 | 0 | 0 | 0 | 0 | 0 | 0 | 0 | 0 | 0 | 0 | 0 | 0 |
| 348 | 0 | 0 | 0 | 0 | 0 | 0.7 | 1 | 0 | 0 | 0 | 0 | 0 | 0 | 0 | 0 | 0 | 0 | 0 | 0 | 0 | 0 |
| 349 | 0 | 0.7 | 0 | 0 | 0 | 0 | 0 | 0 | 0 | 0 | 0 | 0 | 0 | 0 | 0 | 0 | 0 | 0 | 0 | 0 | 0 |
| 350 | 0 | 0 | 0 | 0 | 0 | 0 | 0 | 0 | 0 | 0 | 0.7 | 0 | 0 | 0 | 0 | 0 | 0 | 0 | 0 | 0 | 0 |
| 351 | 0 | 0 | 0 | 0 | 0 | 0 | 0.7 | 0 | 0 | 0 | 0 | 0 | 0 | 0 | 0 | 0 | 0 | 0 | 0 | 0 | 0 |
| 352 | 0 | 0 | 0 | 0 | 0 | 0 | 0 | 0 | 0 | 0 | 0 | 0.7 | 0 | 0 | 0 | 0 | 0 | 0 | 0 | 0 | 0 |
| 353 | 0 | 0 | 0 | 0 | 0 | 0 | 0 | 0 | 0 | 0.7 | 0 | 0 | 0 | 0 | 0 | 0 | 0 | 0 | 0 | 1 | 0 |
| 354 | 0 | 0 | 0 | 0 | 0 | 0 | 0 | 0 | 0 | 0 | 0 | 0 | 0 | 0 | 0 | 0 | 0 | 0 | 0.7 | 0 | 0 |
| 355 | 0 | 0 | 0 | 0 | 0 | 0 | 0 | 0.7 | 0 | 0 | 0 | 0 | 0 | 0 | 0 | 0 | 0 | 0 | 0 | 0 | 0 |
| 356 | 0 | 0 | 0 | 0 | 0 | 0 | 0 | 0 | 0 | 0 | 0 | 0 | 0 | 0 | 0 | 0 | 0.7 | 0 | 0 | 0 | 0 |
| 357 | 0 | 0 | 0.7 | 1 | 0 | 0 | 1 | 0 | 0 | 0 | 0 | 0 | 0 | 0 | 0 | 0 | 0 | 0 | 0 | 0 | 0 |
| 358 | 0 | 0 | 1 | 0.7 | 0 | 0 | 0 | 0 | 1 | 0 | 0 | 0 | 0 | 0 | 0 | 0 | 0 | 0 | 0 | 0 | 0 |
| 359 | 0.7 | 0 | 0 | 0 | 0 | 0 | 0 | 0 | 0 | 0 | 0 | 0 | 0 | 0 | 0 | 0 | 0 | 0 | 0 | 0 | 0 |
| 360 | 0 | 0 | 0 | 0 | 0 | 0 | 0 | 0 | 0 | 0 | 0 | 0 | 0 | 0 | 0 | 0 | 0 | 0.7 | 0 | 0 | 0 |
| 361 | 0 | 0 | 0 | 0 | 0 | 0 | 0 | 0 | 0 | 0.7 | 0 | 0 | 0 | 0 | 0 | 0 | 0 | 0 | 0 | 0 | 0 |
| 362 | 0 | 0 | 0 | 0 | 0 | 0 | 0 | 0 | 0 | 0 | 0.7 | 0 | 0 | 0 | 0 | 0 | 0 | 0 | 0 | 0 | 0 |
| 363 | 0 | 0.7 | 0 | 0 | 0 | 0 | 0 | 0 | 0 | 0 | 0 | 0 | 0 | 0 | 0 | 0 | 0 | 0 | 0 | 0 | 0 |
| 364 | 0 | 0 | 0 | 0 | 0 | 0 | 0 | 0 | 0 | 0 | 0 | 0 | 0 | 0 | 0 | 0 | 0 | 0 | 0 | 0.7 | 0 |
| 365 | 0 | 0 | 0 | 0 | 0 | 0 | 0 | 0 | 0 | 0 | 0 | 0 | 0 | 0 | 0.7 | 0 | 0 | 0 | 0 | 0 | 0 |
| 366 | 0 | 0 | 0 | 0 | 0 | 0 | 0 | 0 | 0 | 0 | 0 | 0 | 0 | 0.7 | 0 | 0 | 0 | 0 | 0 | 0 | 0 |
| 367 | 0 | 0.7 | 0 | 0 | 0 | 0 | 0 | 0 | 0 | 0 | 0 | 0 | 0 | 0 | 0 | 0 | 0 | 0 | 0 | 0 | 0 |
| 368 | 0 | 0 | 0 | 0 | 0 | 0 | 0.7 | 0 | 0 | 0 | 0 | 0 | 0 | 0 | 0 | 0 | 0 | 0 | 0 | 0 | 0 |
| 369 | 0 | 0 | 0 | 0 | 0 | 0 | 0 | 0 | 0 | 0 | 0 | 0 | 0 | 0.7 | 0 | 0 | 0 | 0 | 0 | 0 | 0 |
| 370 | 0 | 0 | 0.7 | 0 | 0 | 0 | 0 | 0 | 0 | 0 | 0 | 0 | 0 | 0 | 0 | 0 | 0 | 0 | 0 | 0 | 0 |
| 371 | 0 | 0 | 0 | 0 | 0 | 0 | 0 | 0 | 0 | 0 | 0 | 0 | 0 | 0 | 0.7 | 0 | 0 | 0 | 0 | 0 | 0 |
| 372 | 0 | 0 | 0 | 0 | 0 | 0 | 0 | 0 | 0 | 0 | 0 | 0.7 | 0 | 0 | 0 | 0 | 0 | 0 | 0 | 0 | 0 |
| 373 | 0 | 0 | 0 | 0 | 0 | 0 | 0 | 0 | 0 | 0 | 0 | 0 | 0 | 0 | 0 | 0 | 0 | 0 | 0 | 0.7 | 0 |
| 374 | 0 | 0 | 0 | 0 | 0 | 0 | 0 | 0 | 0 | 0 | 0 | 0 | 0 | 0 | 0 | 0 | 0.7 | 0 | 0 | 0 | 0 |
| 375 | 0 | 0 | 0 | 0 | 0 | 0.7 | 0 | 0 | 0 | 0 | 0 | 0 | 0 | 0 | 0 | 0 | 0 | 0 | 0 | 0 | 0 |
| 376 | 0 | 0 | 0.7 | 0 | 0 | 0 | 0 | 0 | 0 | 0 | 0 | 0 | 0 | 0 | 0 | 0 | 0 | 0 | 0 | 0 | 0 |
| 377 | 0 | 0 | 0 | 0 | 0 | 0 | 0 | 0 | 0 | 0 | 0 | 0 | 0 | 0 | 0 | 0 | 0 | 0.7 | 0 | 0 | 0 |
| 378 | 0 | 0 | 0 | 0 | 0 | 0 | 0 | 0 | 0 | 0.7 | 0 | 0 | 0 | 0 | 0 | 0 | 0 | 0 | 0 | 0 | 0 |
| 379 | 0 | 0 | 0 | 0 | 0 | 0 | 0 | 0 | 0 | 0 | 0 | 0 | 0 | 0 | 0 | 0.7 | 1 | 0 | 0 | 0 | 0 |
| 380 | 0 | 0.7 | 0 | 0 | 0 | 0 | 0 | 0 | 0 | 0 | 0 | 0 | 0 | 0 | 0 | 0 | 0 | 0 | 0 | 0 | 0 |
| 381 | 0 | 0 | 0 | 0 | 0 | 0 | 0 | 0 | 0 | 0 | 0 | 0 | 0 | 0.7 | 0 | 0 | 0 | 0 | 0 | 0 | 0 |
| 382 | 0 | 0 | 0 | 0 | 0 | 0 | 0.7 | 0 | 0 | 0 | 0 | 0 | 0 | 0 | 0 | 0 | 0 | 0 | 0 | 0 | 0 |
| 383 | 0 | 0 | 0 | 0 | 0 | 0 | 0 | 0 | 0 | 0.7 | 0 | 0 | 0 | 0 | 0 | 0 | 0 | 0 | 0 | 0 | 0 |
| 384 | 0 | 0 | 0 | 0 | 0 | 0 | 0 | 0 | 0 | 0 | 0 | 0 | 0 | 0 | 0 | 0 | 0 | 0.7 | 0 | 0 | 0 |
| 385 | 0 | 0 | 0 | 0 | 0 | 0 | 0 | 0 | 0 | 0 | 0 | 0 | 0 | 0 | 0.7 | 0 | 0 | 0 | 0 | 0 | 0 |
| 386 | 0 | 0 | 0 | 0 | 0 | 0 | 0 | 0 | 0 | 0 | 0 | 0 | 0 | 0 | 0 | 0 | 0 | 0 | 0.7 | 0 | 0 |
| 387 | 0 | 0 | 0 | 0 | 0 | 0 | 0 | 0 | 0 | 0 | 0.7 | 0 | 0 | 0 | 0 | 0 | 0 | 0 | 0 | 0 | 0 |
| 388 | 0 | 0 | 0 | 0 | 0 | 0 | 0.7 | 0 | 0 | 0 | 0 | 0 | 0 | 0 | 0 | 0 | 0 | 0 | 0 | 0 | 0 |
| 389 | 0 | 0 | 0 | 0 | 0 | 0 | 0 | 0 | 0 | 0 | 0 | 0 | 0 | 0 | 0 | 0 | 0.7 | 0 | 0 | 0 | 0 |
| 390 | 0 | 0 | 0 | 0 | 0 | 0 | 0 | 0 | 0 | 0 | 0 | 0 | 0 | 0.7 | 0 | 0 | 0 | 0 | 0 | 0 | 0 |
| 391 | 0.7 | 0 | 0 | 0 | 0 | 0 | 0 | 0 | 0 | 0 | 0 | 0 | 0 | 0 | 0 | 0 | 1 | 0 | 0 | 0 | 0 |
| 392 | 0 | 0 | 0 | 0 | 0 | 0 | 0 | 0 | 0 | 0.7 | 1 | 0 | 0 | 0 | 0 | 0 | 0 | 0 | 0 | 0 | 0 |
| 393 | 0 | 0 | 0 | 0.7 | 0 | 0 | 0 | 0 | 0 | 0 | 0 | 0 | 0 | 0 | 0 | 0 | 0 | 0 | 0 | 0 | 0 |
| 394 | 0.7 | 0 | 0 | 0 | 0 | 0 | 0 | 0 | 0 | 0 | 0 | 0 | 0 | 0 | 0 | 0 | 0 | 0 | 0 | 0 | 0 |
| 395 | 0 | 0 | 0 | 0 | 0 | 0 | 0.7 | 0 | 0 | 0 | 0 | 0 | 0 | 0 | 0 | 0 | 0 | 0 | 0 | 0 | 0 |
| 396 | 0 | 0.7 | 0 | 0 | 0 | 0 | 0 | 0 | 0 | 0 | 0 | 1 | 0 | 0 | 0 | 0 | 1 | 0 | 0 | 0 | 0 |
| 397 | 0 | 0 | 0 | 0 | 0 | 0 | 0.7 | 0 | 0 | 0 | 0 | 0 | 0 | 0 | 0 | 0 | 0 | 0 | 0 | 0 | 0 |
| 398 | 0 | 0 | 0 | 0 | 0 | 0 | 0 | 0 | 0 | 0 | 0.7 | 0 | 0 | 0 | 0 | 0 | 0 | 0 | 0 | 1 | 0 |
| 399 | 0 | 0.7 | 0 | 0 | 0 | 0 | 0 | 0 | 0 | 0 | 1 | 0 | 0 | 0 | 0 | 0 | 0 | 0 | 0 | 0 | 0 |
| 400 | 0.7 | 0 | 0 | 0 | 0 | 0 | 0 | 0 | 0 | 0 | 0 | 0 | 0 | 0 | 0 | 0 | 0 | 0 | 0 | 0 | 0 |
| 401 | 0 | 0 | 0 | 0 | 0 | 0 | 0.7 | 0 | 0 | 0 | 0 | 0 | 0 | 0 | 0 | 0 | 0 | 0 | 0 | 0 | 0 |
| 402 | 0 | 0 | 0 | 0 | 0 | 0 | 0 | 0 | 0 | 0 | 1 | 0 | 1 | 0.7 | 0 | 0 | 0 | 0 | 0 | 0 | 0 |
| 403 | 0 | 0 | 0 | 0 | 0 | 1 | 0 | 0.7 | 0 | 0 | 0 | 0 | 0 | 0 | 0 | 0 | 0 | 0 | 0 | 0 | 0 |
| 404 | 0 | 0 | 0 | 0 | 0 | 0 | 0 | 1 | 0.7 | 0 | 0 | 0 | 0 | 0 | 0 | 0 | 0 | 0 | 0 | 0 | 0 |
| 405 | 0 | 1 | 0 | 0 | 0 | 0 | 0 | 0 | 1 | 0 | 0 | 0 | 0 | 0 | 0 | 0 | 0 | 0 | 0 | 0.7 | 0 |
| 406 | 0 | 0 | 0 | 0 | 0 | 0 | 0 | 0 | 0 | 0 | 0 | 0 | 0 | 0 | 0.7 | 0 | 0 | 0 | 0 | 0 | 0 |
| 407 | 0 | 0 | 0 | 0.7 | 0 | 0 | 0 | 0 | 0 | 0 | 0 | 0 | 0 | 0 | 0 | 0 | 0 | 0 | 0 | 0 | 0 |
| 408 | 0 | 0 | 0 | 0 | 0 | 0 | 0 | 0 | 0 | 0 | 0.7 | 0 | 0 | 0 | 0 | 0 | 0 | 0 | 0 | 1 | 0 |
| 409 | 0 | 0 | 0 | 0 | 0 | 0 | 0 | 0 | 0 | 0.7 | 0 | 0 | 0 | 0 | 0 | 0 | 0 | 0 | 0 | 0 | 0 |
| 410 | 0 | 0 | 0 | 0 | 0 | 0 | 0 | 0 | 0 | 0.7 | 0 | 0 | 0 | 0 | 0 | 0 | 0 | 0 | 0 | 0 | 0 |
| 411 | 0 | 0 | 0 | 0 | 0 | 0 | 0 | 0.7 | 0 | 0 | 0 | 0 | 0 | 0 | 0 | 0 | 0 | 0 | 0 | 0 | 0 |
| 412 | 0 | 0 | 0.7 | 0 | 0 | 0 | 0 | 0 | 0 | 0 | 0 | 0 | 0 | 0 | 0 | 0 | 0 | 0 | 0 | 0 | 0 |
| 413 | 0 | 0 | 0 | 0 | 0 | 0 | 0 | 0 | 0 | 0 | 0 | 0 | 0 | 0 | 0 | 0 | 0 | 0 | 0.7 | 0 | 0 |
| 414 | 0 | 0 | 0 | 0 | 0 | 0 | 0 | 0 | 0 | 0 | 0 | 0 | 0 | 0 | 0 | 0.7 | 0 | 0 | 0 | 0 | 0 |
| 415 | 0 | 0 | 0 | 0.7 | 0 | 0 | 0 | 0 | 0 | 0 | 0 | 0 | 0 | 0 | 0 | 0 | 0 | 0 | 0 | 0 | 0 |
| 416 | 0 | 0 | 0 | 0 | 0 | 0 | 0 | 0.7 | 0 | 0 | 0 | 0 | 0 | 0 | 0 | 0 | 0 | 0 | 0 | 0 | 0 |
| 417 | 0 | 0 | 0.7 | 0 | 0 | 0 | 0 | 0 | 0 | 0 | 0 | 0 | 0 | 0 | 0 | 0 | 0 | 0 | 0 | 0 | 0 |
| 418 | 0 | 0 | 0 | 0 | 0 | 0 | 0 | 0 | 0 | 0 | 0.7 | 0 | 0 | 0 | 0 | 0 | 0 | 0 | 0 | 0 | 0 |
| 419 | 0 | 0 | 0 | 0 | 0 | 0 | 0 | 0 | 0 | 0 | 0 | 0 | 0 | 0 | 0 | 0 | 0 | 0 | 0 | 0.7 | 0 |
| 420 | 0.7 | 0 | 0 | 0 | 0 | 0 | 0 | 0 | 0 | 0 | 0 | 0 | 0 | 0 | 0 | 0 | 0 | 0 | 0 | 0 | 0 |
| 421 | 0 | 0 | 0 | 0 | 0 | 0 | 0 | 0 | 0 | 0 | 0 | 0 | 0 | 0.7 | 0 | 0 | 0 | 0 | 0 | 0 | 0 |
| 422 | 0 | 0 | 0 | 0 | 0 | 0 | 0 | 0 | 0 | 0 | 0.7 | 0 | 0 | 0 | 0 | 0 | 0 | 0 | 0 | 0 | 0 |
| 423 | 0 | 0 | 0 | 0 | 0 | 0 | 0 | 0 | 0 | 0 | 0.7 | 0 | 0 | 0 | 0 | 0 | 0 | 0 | 0 | 0 | 0 |
| 424 | 0.7 | 0 | 0 | 0 | 0 | 0 | 0 | 0 | 0 | 0 | 0 | 0 | 0 | 0 | 0 | 1 | 0 | 0 | 0 | 0 | 0 |
| 425 | 0 | 0.7 | 0 | 0 | 0 | 0 | 0 | 0 | 0 | 0 | 0 | 0 | 0 | 0 | 0 | 0 | 0 | 0 | 0 | 0 | 0 |
| 426 | 0 | 0.7 | 0 | 0 | 0 | 0 | 0 | 0 | 0 | 0 | 0 | 0 | 0 | 0 | 0 | 0 | 0 | 0 | 0 | 0 | 0 |
| 427 | 0 | 0 | 0 | 0 | 0 | 0 | 0 | 0 | 0 | 0 | 0.7 | 0 | 1 | 0 | 0 | 0 | 0 | 0 | 0 | 0 | 0 |
| 428 | 0 | 0 | 0 | 0 | 0 | 0 | 0 | 0 | 0 | 0 | 0 | 0.7 | 0 | 0 | 0 | 0 | 0 | 0 | 0 | 0 | 0 |
| 429 | 0 | 0 | 0 | 0 | 0 | 0 | 0 | 0 | 0 | 0 | 0 | 0 | 0 | 0 | 0 | 0 | 0 | 0 | 0 | 0.7 | 0 |
| 430 | 0 | 0 | 0 | 0 | 0 | 0 | 0 | 0 | 0 | 0 | 0 | 0 | 0 | 0 | 0 | 0 | 0.7 | 0 | 0 | 0 | 0 |
| 431 | 0 | 0 | 0 | 0 | 0 | 0.7 | 0 | 0 | 0 | 0 | 0 | 0 | 0 | 0 | 0 | 0 | 0 | 0 | 0 | 0 | 0 |
| 432 | 0 | 0 | 0 | 0 | 0.7 | 0 | 0 | 0 | 0 | 1 | 0 | 0 | 0 | 0 | 0 | 0 | 0 | 0 | 0 | 0 | 0 |
| 433 | 0 | 0 | 0.7 | 0 | 0 | 0 | 0 | 0 | 0 | 0 | 0 | 0 | 0 | 0 | 0 | 0 | 0 | 0 | 0 | 0 | 0 |
| 434 | 0 | 0 | 0 | 0 | 0 | 0 | 0 | 0 | 0 | 0.7 | 0 | 0 | 0 | 0 | 0 | 0 | 0 | 0 | 0 | 0 | 0 |
| 435 | 0.7 | 0 | 0 | 0 | 0 | 0 | 0 | 0 | 0 | 0 | 0 | 0 | 0 | 0 | 0 | 0 | 0 | 0 | 0 | 0 | 0 |
| 436 | 0 | 0 | 0 | 0 | 0 | 0 | 0 | 0 | 0.7 | 0 | 0 | 0 | 0 | 0 | 0 | 0 | 0 | 0 | 0 | 0 | 0 |
| 437 | 0.7 | 0 | 0 | 0 | 0 | 0 | 0 | 0 | 0 | 0 | 0 | 0 | 0 | 0 | 0 | 0 | 0 | 0 | 0 | 0 | 0 |
| 438 | 0 | 0 | 0 | 0 | 0 | 0 | 0 | 0 | 0 | 0 | 0.7 | 0 | 0 | 0 | 0 | 0 | 0 | 0 | 0 | 0 | 0 |
| 439 | 0 | 0 | 0 | 0 | 0 | 0 | 0.7 | 0 | 0 | 0 | 0 | 0 | 0 | 0 | 0 | 0 | 0 | 0 | 0 | 0 | 0 |
| 440 | 0 | 0 | 0 | 0 | 0 | 0 | 0 | 0 | 0 | 0 | 0 | 0.7 | 0 | 0 | 0 | 0 | 0 | 0 | 0 | 0 | 0 |
| 441 | 0 | 0 | 0 | 0 | 0 | 0 | 0 | 0 | 0 | 0 | 0 | 0 | 0 | 0 | 0 | 0.7 | 1 | 0 | 0 | 0 | 0 |
| 442 | 0 | 0 | 0 | 0 | 0 | 0 | 0 | 0 | 0 | 0 | 0 | 0.7 | 0 | 0 | 0 | 0 | 0 | 0 | 0 | 0 | 0 |
| 443 | 0 | 0 | 0 | 0 | 0 | 0 | 0 | 0 | 0 | 0 | 0 | 0 | 0 | 0 | 0 | 0 | 0 | 0 | 0.7 | 0 | 0 |
| 444 | 0 | 0 | 0 | 0 | 0 | 0 | 0 | 0 | 0 | 0 | 0.7 | 0 | 0 | 0 | 0 | 0 | 0 | 0 | 0 | 0 | 0 |
| 445 | 0 | 0 | 0 | 0 | 0 | 0 | 0 | 0 | 0 | 0 | 0 | 0 | 0 | 0.7 | 0 | 0 | 0 | 0 | 0 | 0 | 0 |
| 446 | 0 | 0 | 0 | 0 | 0 | 0 | 0 | 0 | 0 | 0 | 0 | 0 | 0 | 0 | 0 | 0.7 | 0 | 0 | 0 | 0 | 0 |
| 447 | 0 | 0 | 0.7 | 1 | 0 | 0 | 0 | 0 | 0 | 0 | 0 | 0 | 0 | 0 | 0 | 0 | 0 | 0 | 0 | 0 | 0 |
| 448 | 0 | 0 | 0 | 0 | 0 | 0 | 0 | 0 | 0 | 0 | 0.7 | 0 | 0 | 0 | 0 | 0 | 0 | 0 | 0 | 0 | 0 |
| 449 | 0 | 0 | 0 | 0 | 0 | 0 | 0 | 0 | 0 | 0 | 0 | 0 | 0 | 0 | 0 | 0 | 0 | 0 | 0.7 | 0 | 0 |
| 450 | 0 | 0 | 0 | 0 | 0 | 0 | 0 | 0 | 0 | 0 | 0 | 0 | 0 | 0 | 0 | 0 | 0 | 0.7 | 0 | 0 | 0 |
| 451 | 0 | 0 | 0 | 0 | 0 | 0.7 | 0 | 0 | 0 | 0 | 0 | 0 | 0 | 0 | 0 | 0 | 0 | 0 | 0 | 0 | 0 |
| 452 | 0 | 0 | 0 | 0.7 | 0 | 0 | 0 | 0 | 0 | 0 | 0 | 0 | 0 | 0 | 0 | 0 | 0 | 0 | 0 | 0 | 0 |
| 453 | 0 | 0 | 0 | 0 | 0 | 0 | 0 | 0 | 0 | 0 | 0.7 | 0 | 0 | 0 | 0 | 0 | 0 | 0 | 0 | 0 | 0 |
| 454 | 0 | 0 | 0 | 0 | 0 | 0 | 0.7 | 0 | 0 | 0 | 0 | 0 | 0 | 0 | 0 | 0 | 0 | 0 | 0 | 0 | 0 |
| 455 | 0 | 0 | 0 | 0.7 | 0 | 0 | 0 | 0 | 0 | 0 | 0 | 0 | 0 | 0 | 0 | 0 | 0 | 0 | 0 | 0 | 0 |
| 456 | 0 | 0 | 0 | 0 | 0 | 0 | 0 | 0 | 0 | 0 | 0 | 0.7 | 0 | 0 | 0 | 0 | 0 | 0 | 0 | 0 | 0 |
| 457 | 0 | 0 | 0 | 0 | 0 | 0 | 0 | 0 | 0 | 0 | 0 | 0 | 0 | 0 | 0 | 0 | 0 | 0 | 0.7 | 0 | 0 |
| 458 | 0 | 0 | 0 | 0 | 0 | 0 | 0 | 0 | 0.7 | 0 | 0 | 0 | 0 | 0 | 0 | 0 | 0 | 0 | 0 | 0 | 0 |
| 459 | 0 | 0 | 0 | 0 | 0 | 0 | 0 | 0 | 0 | 0 | 0 | 0 | 0 | 0.7 | 0 | 0 | 0 | 0 | 0 | 0 | 0 |
| 460 | 0 | 0 | 0 | 0 | 0 | 0 | 0 | 0 | 0 | 0 | 0 | 0 | 0 | 0 | 0 | 0.7 | 0 | 0 | 0 | 0 | 0 |
| 461 | 0 | 0 | 0 | 0 | 0 | 0 | 0 | 0 | 0 | 0 | 0.7 | 0 | 1 | 0 | 0 | 0 | 0 | 0 | 0 | 0 | 0 |
| 462 | 0 | 0 | 0 | 0 | 0 | 0.7 | 0 | 0 | 0 | 0 | 0 | 0 | 0 | 0 | 0 | 0 | 0 | 0 | 0 | 0 | 0 |
| 463 | 0 | 0 | 0 | 0 | 0 | 0 | 0 | 0 | 0 | 0 | 0 | 0 | 0 | 0.7 | 0 | 0 | 0 | 0 | 0 | 0 | 0 |
| 464 | 0 | 0 | 0 | 0 | 0 | 0 | 0 | 0 | 0 | 0 | 0 | 0 | 0 | 0 | 0 | 0 | 0.7 | 0 | 0 | 0 | 0 |
| 465 | 0.7 | 0 | 0 | 0 | 0 | 0 | 0 | 0 | 0 | 0 | 0 | 0 | 0 | 0 | 0 | 0 | 0 | 0 | 0 | 0 | 0 |
| 466 | 0 | 0 | 0 | 0.7 | 0 | 0 | 0 | 0 | 0 | 0 | 0 | 0 | 0 | 0 | 0 | 0 | 0 | 0 | 0 | 0 | 0 |
| 467 | 0 | 0 | 0 | 0 | 0 | 0 | 0 | 0 | 0 | 0 | 0.7 | 0 | 0 | 0 | 0 | 0 | 0 | 0 | 0 | 0 | 0 |
| 468 | 0 | 0 | 0 | 0 | 0 | 0 | 0 | 0 | 0 | 0.7 | 0 | 0 | 0 | 0 | 0 | 0 | 0 | 0 | 0 | 0 | 0 |
| 469 | 0.7 | 0 | 0 | 0 | 0 | 0 | 0 | 0 | 0 | 0 | 0 | 0 | 0 | 0 | 0 | 0 | 1 | 0 | 0 | 0 | 0 |
| 470 | 0 | 0 | 0 | 0 | 0 | 0 | 0 | 0 | 0 | 0 | 0 | 0 | 0.7 | 0 | 0 | 0 | 0 | 0 | 0 | 0 | 0 |
| 471 | 0 | 0 | 0.7 | 0 | 0 | 0 | 0 | 0 | 0 | 0 | 0 | 0 | 0 | 0 | 0 | 0 | 0 | 0 | 0 | 0 | 0 |
| 472 | 0.7 | 0 | 0 | 0 | 0 | 0 | 0 | 0 | 0 | 0 | 0 | 0 | 0 | 0 | 0 | 0 | 0 | 0 | 0 | 0 | 0 |
| 473 | 0.7 | 0 | 0 | 0 | 0 | 0 | 0 | 0 | 0 | 0 | 0 | 0 | 0 | 0 | 0 | 0 | 0 | 0 | 0 | 0 | 0 |
| 474 | 0 | 0 | 0.7 | 1 | 0 | 0 | 0 | 0 | 0 | 0 | 0 | 0 | 0 | 0 | 0 | 0 | 0 | 0 | 0 | 0 | 0 |
| 475 | 1 | 0 | 0 | 0 | 0 | 0 | 0 | 0 | 0 | 0 | 0 | 0 | 0 | 0.7 | 0 | 0 | 0 | 0 | 0 | 0 | 0 |
| 476 | 0 | 0 | 0 | 0 | 0 | 0 | 0 | 0 | 0 | 0.7 | 0 | 0 | 0 | 0 | 0 | 0 | 0 | 0 | 0 | 0 | 0 |
| 477 | 0 | 0 | 0 | 0 | 0 | 0 | 0 | 0 | 0 | 0.7 | 0 | 0 | 0 | 0 | 0 | 0 | 0 | 0 | 0 | 1 | 0 |
| 478 | 0 | 0 | 0 | 0 | 0 | 0 | 0 | 0 | 0 | 0 | 0 | 0 | 0 | 0 | 0 | 0.7 | 0 | 0 | 0 | 0 | 0 |
| 479 | 0 | 0 | 0 | 0 | 0 | 0 | 0 | 0 | 0 | 0 | 0 | 0 | 0 | 0 | 0 | 0.7 | 0 | 0 | 0 | 0 | 0 |
| 480 | 0 | 0 | 0 | 0 | 0 | 0 | 0 | 0 | 0 | 0 | 0 | 0 | 0 | 0 | 0 | 0 | 0.7 | 0 | 0 | 0 | 0 |
| 481 | 0 | 0 | 0 | 0 | 0 | 0 | 0 | 0 | 0 | 0 | 0 | 0 | 0 | 0 | 0 | 0 | 0 | 0 | 0.7 | 0 | 0 |
| 482 | 0 | 0 | 0 | 0 | 0 | 0.7 | 0 | 0 | 0 | 0 | 0 | 0 | 0 | 0 | 0 | 0 | 0 | 0 | 0 | 0 | 0 |
| 483 | 0 | 0 | 0 | 0 | 0 | 0 | 0.7 | 0 | 0 | 0 | 0 | 0 | 0 | 0 | 0 | 0 | 0 | 0 | 0 | 0 | 0 |
| 484 | 0 | 0 | 0 | 0 | 0 | 0 | 0 | 0 | 0 | 0.7 | 0 | 0 | 0 | 0 | 0 | 0 | 0 | 0 | 0 | 0 | 0 |
| 485 | 0 | 0 | 0 | 0 | 0 | 0 | 0 | 0 | 0 | 0 | 0 | 0 | 0 | 0 | 0 | 0 | 0 | 0 | 0 | 0.7 | 0 |
| 486 | 0 | 0 | 0 | 0 | 0 | 0 | 0 | 0.7 | 0 | 0 | 0 | 0 | 0 | 0 | 0 | 0 | 0 | 0 | 0 | 0 | 0 |
| 487 | 0 | 0 | 0 | 0 | 0 | 0 | 0 | 0 | 0 | 0 | 0 | 0 | 0 | 0 | 0 | 0 | 0.7 | 0 | 0 | 0 | 0 |
| 488 | 0 | 0 | 0 | 0 | 0 | 0 | 0 | 0 | 0 | 0 | 0 | 0 | 0 | 0 | 0.7 | 0 | 0 | 0 | 0 | 0 | 0 |
| 489 | 0 | 0 | 0 | 0.7 | 0 | 0 | 0 | 0 | 0 | 0 | 0 | 0 | 0 | 0 | 0 | 0 | 0 | 0 | 0 | 0 | 0 |
| 490 | 0 | 0 | 0 | 0 | 0 | 0 | 0 | 0 | 0 | 0 | 0 | 0 | 0 | 0 | 0 | 0.7 | 0 | 0 | 0 | 0 | 0 |
| 491 | 0 | 0 | 0 | 0 | 0 | 0 | 0 | 0 | 0 | 0.7 | 0 | 0 | 0 | 0 | 0 | 0 | 0 | 0 | 0 | 0 | 0 |
| 492 | 0 | 0 | 0 | 0 | 0 | 0 | 0 | 0.7 | 0 | 0 | 0 | 0 | 0 | 0 | 0 | 0 | 0 | 0 | 0 | 0 | 0 |
| 493 | 0 | 0 | 0 | 0 | 0 | 0.7 | 0 | 0 | 0 | 0 | 0 | 0 | 0 | 0 | 0 | 0 | 0 | 0 | 0 | 0 | 0 |
| 494 | 0 | 0 | 0 | 0 | 0 | 0 | 0 | 0 | 0 | 0 | 0 | 0 | 0 | 0 | 0 | 0 | 0 | 0 | 0.7 | 0 | 0 |
| 495 | 0 | 0 | 0 | 0 | 0 | 0 | 0.7 | 0 | 0 | 0 | 0 | 0 | 0 | 0 | 0 | 0 | 0 | 0 | 0 | 0 | 0 |
| 496 | 0 | 0 | 0 | 0 | 0 | 0 | 0 | 0 | 0 | 0 | 0 | 0 | 0 | 0 | 0 | 0.7 | 0 | 0 | 0 | 0 | 0 |
| 497 | 0 | 0 | 0 | 0 | 0 | 0 | 0 | 0 | 0 | 0 | 0 | 0 | 0 | 0 | 0 | 0 | 0 | 0 | 0.7 | 0 | 0 |
| 498 | 0 | 0 | 0 | 0 | 0 | 0.7 | 0 | 0 | 0 | 0 | 0 | 0 | 0 | 0 | 0 | 0 | 0 | 0 | 0 | 0 | 0 |
| 499 | 0 | 0 | 0 | 0 | 0 | 0 | 0 | 0 | 0 | 0 | 0 | 0 | 0 | 0 | 0 | 0.7 | 0 | 0 | 0 | 0 | 0 |
| 500 | 0 | 0 | 0 | 0 | 0 | 0 | 0 | 0 | 0 | 0 | 0 | 0 | 0 | 0.7 | 0 | 0 | 0 | 0 | 0 | 0 | 0 |
| 501 | 0 | 0 | 0 | 0 | 0 | 0 | 0 | 0 | 0 | 0 | 0 | 0 | 0 | 0 | 0 | 0 | 0.7 | 0 | 0 | 0 | 0 |
| 502 | 0 | 0 | 0 | 0 | 0 | 0 | 0 | 0 | 0 | 0 | 0 | 0 | 0.7 | 0 | 0 | 0 | 0 | 0 | 0 | 0 | 0 |
| 503 | 0 | 0 | 0 | 0 | 0 | 0 | 0 | 0 | 0 | 0 | 0 | 0 | 0 | 0 | 0.7 | 0 | 0 | 0 | 0 | 0 | 0 |
| 504 | 0 | 0 | 0 | 0.7 | 0 | 0 | 1 | 0 | 0 | 0 | 0 | 0 | 0 | 0 | 0 | 0 | 0 | 0 | 0 | 0 | 0 |
| 505 | 0 | 0 | 0 | 0 | 0 | 0 | 0 | 0 | 0 | 0 | 0.7 | 0 | 0 | 0 | 0 | 0 | 0 | 0 | 0 | 0 | 0 |
| 506 | 0 | 0 | 0 | 0 | 0 | 0 | 0 | 0 | 0 | 0 | 0 | 0 | 0 | 0 | 0 | 0 | 0 | 0 | 0.7 | 0 | 0 |
| 507 | 0 | 1 | 0 | 0 | 0 | 0 | 0 | 0 | 0.7 | 0 | 0 | 0 | 0 | 0 | 0 | 0 | 0 | 0 | 0 | 0 | 0 |
| 508 | 0 | 0 | 0 | 0 | 0 | 0 | 0 | 0 | 0 | 0 | 0 | 0 | 0 | 0 | 0 | 0 | 0 | 0 | 0 | 0.7 | 0 |
| 509 | 0 | 0 | 0 | 0 | 0 | 0 | 0 | 0 | 0 | 0 | 0 | 0 | 0 | 0 | 0 | 0 | 0 | 0 | 0 | 0.7 | 0 |
| 510 | 0 | 0 | 0.7 | 0 | 0 | 0 | 0 | 0 | 0 | 0 | 0 | 0 | 0 | 0 | 0 | 0 | 0 | 0 | 0 | 0 | 0 |
| 511 | 0 | 0 | 0 | 0 | 0 | 0 | 0 | 0.7 | 0 | 0 | 0 | 0 | 0 | 0 | 0 | 0 | 0 | 0 | 0 | 0 | 0 |
| 512 | 0 | 0 | 0 | 0 | 0 | 0 | 0 | 0 | 0 | 0.7 | 0 | 0 | 0 | 0 | 0 | 0 | 0 | 0 | 0 | 0 | 0 |
| 513 | 0 | 0 | 0 | 0 | 0 | 0 | 0.7 | 0 | 0 | 0 | 0 | 0 | 0 | 0 | 0 | 0 | 0 | 0 | 0 | 0 | 0 |
| 514 | 0 | 0 | 0 | 0 | 0 | 0 | 0 | 0 | 0 | 0 | 0.7 | 0 | 0 | 0 | 0 | 0 | 0 | 0 | 0 | 0 | 0 |
| 515 | 0 | 0 | 0 | 0 | 0 | 0 | 0 | 0 | 0 | 0 | 0 | 0 | 0 | 0.7 | 0 | 0 | 0 | 0 | 0 | 0 | 0 |
| 516 | 0 | 0 | 0 | 0 | 0 | 0 | 0 | 0 | 1 | 0 | 0 | 0 | 0 | 0 | 0 | 0.7 | 0 | 0 | 0 | 0 | 0 |
| 517 | 0 | 0 | 0 | 0 | 0 | 0 | 0 | 0 | 0 | 0 | 0 | 0 | 0 | 0 | 0.7 | 0 | 0 | 0 | 0 | 0 | 0 |
| 518 | 0 | 0 | 0 | 0 | 0 | 0 | 0 | 0 | 0 | 0 | 0 | 0.7 | 0 | 0 | 0 | 0 | 0 | 0 | 0 | 0 | 0 |
| 519 | 0 | 0 | 0 | 0 | 0 | 0 | 0 | 0 | 0 | 0 | 0 | 0 | 0 | 0.7 | 0 | 0 | 0 | 0 | 0 | 0 | 0 |
| 520 | 0 | 0 | 0.7 | 0 | 0 | 0 | 0 | 0 | 0 | 0 | 0 | 0 | 0 | 0 | 0 | 0 | 0 | 0 | 0 | 0 | 0 |
| 521 | 0 | 0 | 0 | 0 | 0 | 0 | 0 | 0 | 0 | 0 | 0 | 0 | 0 | 0 | 0 | 0 | 0 | 0 | 0 | 0.7 | 0 |
| 522 | 0 | 0 | 0 | 0 | 0 | 0 | 0 | 0 | 0 | 1 | 0 | 0 | 0 | 0 | 0 | 0 | 0 | 0 | 0 | 0.7 | 0 |
| 523 | 0 | 0 | 0 | 0 | 0 | 0 | 0 | 0 | 0 | 0 | 0 | 0 | 0 | 0 | 0.7 | 0 | 0 | 0 | 0 | 0 | 0 |
| 524 | 0 | 0 | 0 | 0 | 0 | 0 | 0 | 0 | 0 | 0 | 0 | 0 | 0 | 0 | 0.7 | 0 | 0 | 0 | 0 | 0 | 0 |
| 525 | 0 | 0 | 0 | 0 | 0 | 0 | 0 | 0.7 | 0 | 0 | 0 | 0 | 0 | 0 | 0 | 0 | 0 | 0 | 0 | 0 | 0 |
| 526 | 1 | 0 | 0 | 0 | 0 | 0 | 0 | 0 | 0 | 0 | 0 | 0 | 0 | 0 | 0 | 0 | 0 | 0 | 0 | 0.7 | 0 |
| 527 | 0 | 0 | 0.7 | 0 | 0 | 0 | 0 | 0 | 0 | 0 | 0 | 0 | 0 | 0 | 0 | 0 | 0 | 0 | 0 | 0 | 0 |
| 528 | 0 | 0 | 0 | 0 | 0 | 0 | 0.7 | 0 | 0 | 0 | 0 | 0 | 0 | 0 | 0 | 0 | 0 | 0 | 0 | 0 | 0 |
| 529 | 0 | 0 | 1 | 0 | 0 | 0.7 | 1 | 0 | 0 | 0 | 0 | 0 | 0 | 0 | 0 | 0 | 0 | 0 | 0 | 0 | 0 |
| 530 | 0 | 0 | 0 | 0 | 0 | 0 | 0 | 0 | 0 | 0 | 0 | 0 | 0 | 0 | 0 | 0 | 0 | 0 | 0 | 0.7 | 0 |
| 531 | 0 | 0 | 0 | 0 | 0 | 0 | 0 | 0 | 0 | 0 | 0 | 0 | 0 | 0 | 0 | 0 | 0 | 0 | 0.7 | 0 | 0 |
| 532 | 0 | 0 | 0 | 0 | 0 | 0 | 0 | 0 | 0 | 0 | 0 | 0 | 0 | 0.7 | 0 | 0 | 0 | 0 | 0 | 0 | 0 |
| 533 | 0 | 0 | 0 | 0 | 0 | 0 | 0 | 0 | 0 | 0 | 0 | 0 | 0 | 0 | 0.7 | 0 | 0 | 0 | 0 | 0 | 0 |
| 534 | 0 | 0 | 0 | 0 | 0 | 0 | 0 | 0 | 0 | 0 | 0 | 0 | 0 | 0 | 0 | 0 | 0 | 0 | 0.7 | 0 | 0 |
| 535 | 0 | 0 | 0 | 0 | 0 | 0 | 0 | 0 | 0 | 0 | 0 | 0 | 0 | 0 | 0 | 0 | 1 | 0 | 0.7 | 0 | 0 |
| 536 | 0 | 1 | 0 | 0 | 0 | 0 | 1 | 0 | 0.7 | 0 | 0 | 0 | 0 | 0 | 0 | 0 | 0 | 0 | 0 | 0 | 0 |
| 537 | 0 | 1 | 1 | 0 | 0 | 1 | 0 | 0 | 0 | 0 | 0 | 1 | 0 | 0 | 0 | 0 | 1 | 0 | 0.7 | 0 | 0 |
| 538 | 0 | 0 | 0 | 0 | 0 | 1 | 1 | 0 | 0 | 0 | 0 | 0 | 0 | 0 | 0 | 0 | 0.7 | 0 | 0 | 0 | 0 |
| 539 | 0 | 1 | 1 | 1 | 0 | 0 | 0.7 | 0 | 0 | 0 | 0 | 1 | 0 | 0 | 0 | 0 | 0 | 0 | 0 | 0 | 0 |
| 540 | 0 | 0.7 | 0 | 0 | 0 | 0 | 0 | 0 | 0 | 0 | 0 | 0 | 0 | 0 | 0 | 0 | 0 | 0 | 0 | 0 | 0 |
| 541 | 0 | 0 | 0 | 0 | 0 | 0 | 0 | 0 | 0 | 0 | 0.7 | 0 | 0 | 0 | 0 | 0 | 0 | 0 | 0 | 1 | 0 |
| 542 | 0 | 0 | 0 | 0 | 0 | 0 | 0.7 | 0 | 0 | 0 | 0 | 0 | 0 | 0 | 0 | 0 | 0 | 0 | 0 | 0 | 0 |
| 543 | 0 | 0 | 1 | 0 | 0 | 0 | 0 | 0.7 | 0 | 0 | 0 | 0 | 0 | 0 | 0 | 1 | 0 | 0 | 0 | 0 | 0 |
| 544 | 0 | 0 | 0 | 0.7 | 0 | 0 | 1 | 0 | 0 | 0 | 0 | 0 | 0 | 0 | 0 | 0 | 0 | 0 | 0 | 0 | 0 |
| 545 | 1 | 0.7 | 0 | 0 | 0 | 0 | 0 | 0 | 0 | 0 | 0 | 0 | 0 | 0 | 0 | 0 | 0 | 0 | 0 | 0 | 0 |
| 546 | 0 | 0 | 0 | 0 | 0 | 0.7 | 0 | 0 | 0 | 0 | 0 | 0 | 0 | 0 | 0 | 0 | 0 | 0 | 0 | 0 | 0 |
| 547 | 0 | 0.7 | 0 | 0 | 0 | 0 | 0 | 0 | 0 | 0 | 0 | 0 | 0 | 0 | 0 | 0 | 0 | 0 | 0 | 0 | 0 |
| 548 | 0 | 0 | 0 | 0 | 0 | 0 | 0 | 0 | 0 | 0 | 0.7 | 0 | 0 | 0 | 0 | 0 | 0 | 0 | 0 | 0 | 0 |
| 549 | 0 | 0 | 0 | 0 | 0 | 0 | 0.7 | 0 | 0 | 0 | 0 | 0 | 0 | 0 | 0 | 0 | 0 | 0 | 0 | 0 | 0 |
| 550 | 0 | 0 | 0 | 0 | 0 | 0 | 0.7 | 0 | 0 | 0 | 0 | 0 | 0 | 0 | 0 | 0 | 0 | 0 | 0 | 0 | 0 |
| 551 | 0 | 0 | 0 | 0 | 0 | 0 | 0 | 0 | 0 | 0 | 0.7 | 0 | 0 | 0 | 0 | 0 | 0 | 0 | 0 | 0 | 0 |
| 552 | 0 | 0 | 0 | 0 | 0 | 0 | 0 | 0 | 0 | 0 | 0.7 | 0 | 0 | 0 | 0 | 0 | 0 | 0 | 0 | 0 | 0 |
| 553 | 0 | 0 | 0 | 0 | 0 | 0 | 0 | 0 | 0 | 0 | 0 | 0 | 0 | 0.7 | 0 | 0 | 0 | 0 | 0 | 0 | 0 |
| 554 | 0 | 0 | 0 | 0 | 0 | 0 | 0 | 0 | 0 | 0 | 0 | 0 | 0 | 0 | 0 | 0 | 0.7 | 0 | 0 | 0 | 0 |
| 555 | 0 | 0 | 0 | 0 | 0 | 0 | 0 | 0 | 0 | 0 | 0.7 | 0 | 0 | 0 | 0 | 0 | 0 | 0 | 0 | 0 | 0 |
| 556 | 0 | 0 | 0 | 0 | 0 | 0 | 0.7 | 0 | 0 | 0 | 0 | 0 | 0 | 0 | 0 | 0 | 0 | 0 | 0 | 0 | 0 |
| 557 | 0 | 0 | 0 | 0.7 | 0 | 0 | 0 | 0 | 0 | 0 | 0 | 0 | 0 | 0 | 0 | 0 | 0 | 0 | 0 | 0 | 0 |
| 558 | 0 | 0 | 0 | 0 | 0 | 0 | 0 | 0 | 0 | 0 | 0 | 0 | 0 | 0 | 0.7 | 0 | 0 | 0 | 0 | 0 | 0 |
| 559 | 0 | 0 | 0 | 0 | 0 | 0.7 | 1 | 0 | 0 | 0 | 0 | 0 | 0 | 0 | 0 | 1 | 0 | 0 | 0 | 0 | 0 |
| 560 | 0 | 0 | 0 | 0 | 0 | 0.7 | 1 | 0 | 0 | 0 | 0 | 0 | 0 | 0 | 0 | 0 | 0 | 0 | 0 | 0 | 0 |
| 561 | 0 | 0 | 0 | 0 | 0 | 0 | 0 | 0 | 0 | 0.7 | 0 | 0 | 0 | 0 | 0 | 0 | 0 | 0 | 0 | 0 | 0 |
| 562 | 0 | 0 | 0 | 0 | 0 | 0 | 0 | 0 | 0 | 0 | 0 | 0 | 0 | 1 | 0 | 0 | 0 | 0 | 0.7 | 0 | 0 |
| 563 | 0 | 0 | 0 | 0 | 0 | 0 | 0 | 0.7 | 0 | 0 | 0 | 0 | 0 | 0 | 0 | 0 | 0 | 0 | 0 | 0 | 0 |
| 564 | 0 | 0 | 1 | 0 | 0 | 0 | 0 | 0 | 1 | 0 | 0 | 1 | 0 | 0 | 0 | 0 | 0 | 0 | 0.7 | 0 | 0 |
| 565 | 0 | 0 | 0 | 0 | 0 | 0 | 0 | 0 | 0 | 0 | 0.7 | 0 | 0 | 0 | 0 | 0 | 0 | 0 | 0 | 0 | 0 |
| 566 | 0 | 0 | 0 | 1 | 0 | 0 | 0.7 | 0 | 0 | 0 | 0 | 0 | 0 | 0 | 0 | 1 | 0 | 0 | 0 | 0 | 0 |
| 567 | 0.7 | 0 | 1 | 1 | 0 | 0 | 0 | 0 | 0 | 0 | 0 | 0 | 0 | 0 | 0 | 0 | 0 | 0 | 0 | 0 | 0 |
| 568 | 0 | 0 | 0 | 0 | 0 | 1 | 0 | 0 | 0 | 0 | 1 | 0 | 0 | 0 | 0.7 | 0 | 0 | 0 | 0 | 0 | 0 |
| 569 | 0 | 0 | 1 | 0 | 0 | 1 | 0.7 | 0 | 1 | 0 | 0 | 1 | 0 | 0 | 0 | 1 | 0 | 0 | 0 | 0 | 0 |
| 570 | 0 | 0 | 0 | 0 | 0 | 0 | 0 | 0 | 0 | 0 | 0 | 0.7 | 0 | 0 | 0 | 0 | 0 | 0 | 0 | 0 | 0 |
| 571 | 0 | 0.7 | 0 | 0 | 0 | 0 | 0 | 0 | 0 | 0 | 0 | 0 | 0 | 0 | 0 | 0 | 0 | 0 | 0 | 0 | 0 |
| 572 | 0 | 0 | 0 | 0 | 0 | 0 | 0 | 0 | 0 | 0 | 0 | 0 | 0 | 0 | 0.7 | 0 | 0 | 0 | 0 | 0 | 0 |
| 573 | 0 | 0 | 0 | 0 | 0 | 0 | 0 | 0 | 0 | 0 | 0.7 | 0 | 0 | 0 | 0 | 0 | 0 | 0 | 0 | 0 | 0 |
| 574 | 0 | 0 | 0 | 0 | 0 | 0 | 0 | 0 | 0 | 0 | 0 | 0 | 0 | 0.7 | 0 | 0 | 0 | 0 | 0 | 0 | 0 |
| 575 | 0 | 0 | 0 | 0 | 0 | 0 | 0 | 0 | 0 | 0 | 0 | 0 | 0 | 0 | 0 | 0.7 | 0 | 0 | 0 | 0 | 0 |
| 576 | 0 | 0 | 0 | 0 | 0 | 0 | 0 | 0 | 0 | 0 | 0 | 0 | 0.7 | 0 | 0 | 0 | 0 | 0 | 0 | 0 | 0 |
| 577 | 0.7 | 0 | 0 | 0 | 0 | 0 | 0 | 0 | 0 | 0 | 0 | 0 | 0 | 0 | 0 | 0 | 0 | 0 | 0 | 0 | 0 |
| 578 | 0 | 0.7 | 0 | 0 | 0 | 0 | 0 | 0 | 0 | 0 | 0 | 0 | 0 | 0 | 0 | 0 | 0 | 0 | 0 | 0 | 0 |
| 579 | 0 | 0 | 0 | 0 | 0 | 0 | 0 | 0 | 0 | 0 | 0.7 | 0 | 0 | 0 | 0 | 0 | 0 | 0 | 0 | 0 | 0 |
| 580 | 0 | 0 | 0 | 0.7 | 0 | 0 | 0 | 0 | 0 | 0 | 0 | 0 | 0 | 0 | 0 | 0 | 0 | 0 | 0 | 0 | 0 |
| 581 | 0 | 0.7 | 0 | 0 | 0 | 0 | 0 | 0 | 0 | 0 | 0 | 0 | 0 | 0 | 0 | 0 | 0 | 0 | 0 | 0 | 0 |
| 582 | 0 | 0 | 0 | 0 | 0 | 0 | 0 | 0 | 0 | 0.7 | 0 | 0 | 0 | 0 | 0 | 0 | 0 | 0 | 0 | 0 | 0 |
| 583 | 0 | 0 | 0 | 0 | 0 | 0 | 0 | 0 | 0 | 0 | 0 | 0.7 | 0 | 0 | 0 | 0 | 0 | 0 | 0 | 0 | 0 |
| 584 | 0 | 0 | 0.7 | 0 | 0 | 0 | 0 | 0 | 0 | 0 | 0 | 0 | 0 | 0 | 0 | 0 | 0 | 0 | 0 | 0 | 0 |
| 585 | 0 | 0 | 0 | 0 | 0 | 0 | 0 | 0 | 0 | 1 | 0.7 | 0 | 0 | 0 | 0 | 0 | 0 | 0 | 0 | 0 | 0 |
| 586 | 0 | 0 | 0 | 0 | 0 | 0 | 0 | 0 | 0 | 0 | 0 | 0 | 0 | 0 | 0 | 0 | 0.7 | 0 | 0 | 0 | 0 |
| 587 | 0 | 0 | 0 | 0 | 0 | 0 | 0 | 0.7 | 0 | 0 | 0 | 0 | 0 | 0 | 0 | 0 | 0 | 0 | 0 | 0 | 0 |
| 588 | 0 | 0 | 0 | 0 | 0 | 0 | 0 | 0 | 0 | 0 | 0.7 | 0 | 0 | 0 | 0 | 0 | 0 | 0 | 0 | 0 | 0 |
| 589 | 0.7 | 0 | 0 | 0 | 0 | 0 | 0 | 0 | 0 | 0 | 1 | 0 | 1 | 0 | 0 | 0 | 0 | 0 | 0 | 0 | 0 |
| 590 | 0 | 0 | 0 | 0 | 0 | 0 | 0.7 | 0 | 0 | 0 | 0 | 0 | 0 | 0 | 0 | 0 | 0 | 0 | 0 | 0 | 0 |
| 591 | 0.7 | 0 | 0 | 0 | 1 | 0 | 0 | 0 | 0 | 0 | 0 | 0 | 0 | 0 | 0 | 0 | 0 | 0 | 0 | 0 | 0 |
| 592 | 0 | 0 | 0 | 0 | 0 | 0 | 0 | 0 | 0 | 0 | 0 | 0 | 0 | 0.7 | 0 | 0 | 0 | 0 | 1 | 0 | 0 |
| 593 | 0 | 0 | 0 | 0 | 0 | 0 | 0 | 0.7 | 0 | 0 | 0 | 0 | 0 | 0 | 0 | 0 | 0 | 0 | 0 | 0 | 0 |
| 594 | 0 | 0.7 | 0 | 0 | 0 | 0 | 0 | 0 | 0 | 0 | 0 | 1 | 0 | 0 | 0 | 0 | 0 | 0 | 0 | 0 | 0 |
| 595 | 0 | 0 | 1 | 0 | 0 | 0 | 0 | 0 | 0 | 0 | 0 | 0 | 0 | 0 | 0 | 0.7 | 0 | 0 | 0 | 0 | 0 |
| 596 | 0 | 0 | 0 | 0 | 0 | 1 | 0 | 0 | 0 | 0 | 0 | 0.7 | 0 | 0 | 1 | 0 | 0 | 0 | 0 | 0 | 0 |
| 597 | 0.7 | 0 | 0 | 0 | 0 | 0 | 1 | 0 | 0 | 0 | 0 | 1 | 0 | 0 | 0 | 0 | 0 | 0 | 0 | 0 | 0 |
| 598 | 0 | 0 | 0 | 0 | 0 | 0 | 0 | 0 | 0 | 0 | 0.7 | 0 | 0 | 0 | 0 | 0 | 0 | 0 | 0 | 0 | 0 |
| 599 | 0 | 0 | 0 | 0 | 0 | 0.7 | 0 | 0 | 0 | 0 | 0 | 0 | 0 | 0 | 0 | 0 | 0 | 0 | 0 | 0 | 0 |
| 600 | 0 | 0 | 0 | 0 | 0 | 0 | 0.7 | 0 | 0 | 0 | 0 | 0 | 0 | 0 | 0 | 0 | 0 | 0 | 0 | 0 | 0 |
| 601 | 0 | 0.7 | 0 | 0 | 0 | 1 | 0 | 0 | 0 | 0 | 0 | 1 | 0 | 0 | 0 | 0 | 0 | 0 | 0 | 0 | 0 |
| 602 | 0 | 0 | 0 | 0 | 0.7 | 0 | 0 | 0 | 0 | 0 | 0 | 0 | 0 | 0 | 0 | 0 | 0 | 0 | 0 | 0 | 0 |
| 603 | 0 | 0 | 0.7 | 0 | 0 | 0 | 0 | 0 | 0 | 0 | 0 | 0 | 0 | 0 | 0 | 0 | 0 | 0 | 0 | 0 | 0 |
| 604 | 0 | 0 | 0 | 0 | 0 | 0 | 0 | 0 | 0 | 0 | 0.7 | 0 | 0 | 0 | 0 | 0 | 0 | 0 | 0 | 0 | 0 |
| 605 | 0 | 0 | 0 | 0 | 0 | 0 | 0 | 0 | 0 | 0.7 | 0 | 0 | 0 | 0 | 0 | 0 | 0 | 0 | 0 | 0 | 0 |
| 606 | 0 | 0 | 0 | 0 | 0 | 0 | 0 | 0 | 0 | 0 | 0.7 | 0 | 0 | 0 | 0 | 0 | 0 | 0 | 0 | 1 | 0 |
| 607 | 0 | 0 | 0 | 0 | 0 | 0 | 0 | 0 | 0 | 0 | 0 | 0 | 0 | 0 | 0 | 0 | 0 | 0 | 0 | 0.7 | 0 |
| 608 | 0.7 | 0 | 0 | 0 | 0 | 0 | 0 | 0 | 0 | 0 | 0 | 0 | 0 | 0 | 0 | 0 | 0 | 0 | 0 | 0 | 0 |
| 609 | 0 | 0 | 0 | 0 | 0 | 0 | 0 | 0.7 | 0 | 0 | 0 | 0 | 0 | 0 | 0 | 0 | 0 | 0 | 0 | 0 | 0 |
| 610 | 0 | 0 | 0 | 0 | 0 | 0 | 0 | 0 | 0 | 0 | 0 | 0.7 | 0 | 0 | 0 | 0 | 0 | 0 | 1 | 0 | 0 |
| 611 | 0 | 0 | 0 | 0 | 0 | 0 | 0 | 0 | 0 | 0 | 0.7 | 0 | 0 | 0 | 0 | 0 | 0 | 0 | 0 | 1 | 0 |
| 612 | 0 | 0.7 | 0 | 1 | 0 | 0 | 0 | 0 | 0 | 0 | 0 | 0 | 0 | 0 | 0 | 0 | 0 | 0 | 0 | 0 | 0 |
| 613 | 0 | 0 | 0 | 0 | 0 | 0 | 0 | 0 | 0 | 0 | 0 | 0 | 0 | 0 | 1 | 0 | 0.7 | 0 | 0 | 0 | 0 |
| 614 | 0.7 | 0 | 0 | 0 | 0 | 0 | 1 | 0 | 0 | 0 | 0 | 0 | 0 | 0 | 0 | 0 | 0 | 0 | 0 | 0 | 0 |
| 615 | 0 | 0 | 0 | 0.7 | 0 | 0 | 0 | 1 | 0 | 0 | 0 | 0 | 0 | 0 | 0 | 0 | 0 | 0 | 0 | 0 | 0 |
| 616 | 0 | 0 | 0 | 0 | 0 | 0 | 0 | 0 | 0 | 0 | 0 | 0 | 0 | 0 | 0 | 0.7 | 0 | 0 | 0 | 0 | 0 |
| 617 | 0 | 0 | 0 | 0 | 0 | 0 | 0 | 0 | 0 | 0 | 0 | 0 | 0 | 0 | 0 | 0.7 | 1 | 0 | 0 | 0 | 0 |
| 618 | 0 | 0 | 0 | 0.7 | 0 | 0 | 0 | 0 | 0 | 0 | 0 | 0 | 0 | 0 | 0 | 0 | 0 | 0 | 0 | 0 | 0 |
| 619 | 0 | 0.7 | 0 | 0 | 0 | 0 | 0 | 0 | 0 | 0 | 0 | 0 | 0 | 0 | 0 | 1 | 0 | 0 | 1 | 0 | 0 |
| 620 | 0 | 0 | 0 | 0 | 0 | 0 | 0.7 | 0 | 0 | 0 | 0 | 0 | 0 | 0 | 0 | 0 | 0 | 0 | 0 | 0 | 0 |
| 621 | 0 | 0 | 0 | 0 | 0 | 0 | 0.7 | 0 | 0 | 0 | 0 | 0 | 0 | 0 | 0 | 0 | 0 | 0 | 0 | 0 | 0 |
| 622 | 0 | 1 | 0 | 0 | 0 | 0 | 0 | 0 | 0 | 0.7 | 0 | 1 | 0 | 0 | 0 | 0 | 0 | 0 | 0 | 0 | 0 |
| 623 | 0.7 | 0 | 0 | 1 | 0 | 0 | 0 | 0 | 0 | 0 | 0 | 0 | 0 | 0 | 0 | 0 | 0 | 0 | 0 | 0 | 0 |
| 624 | 0 | 0 | 0 | 0 | 0 | 0 | 0.7 | 0 | 0 | 0 | 0 | 0 | 0 | 0 | 0 | 0 | 0 | 0 | 0 | 0 | 0 |
| 625 | 0 | 0 | 0 | 0 | 0 | 0 | 0 | 0 | 0 | 0.7 | 0 | 0 | 0 | 0 | 0 | 0 | 0 | 0 | 0 | 0 | 0 |
| 626 | 0 | 0 | 0 | 0 | 0 | 0 | 0.7 | 0 | 0 | 0 | 0 | 0 | 0 | 0 | 0 | 0 | 0 | 0 | 0 | 0 | 0 |
| 627 | 0 | 0 | 0 | 0 | 0 | 0 | 0 | 0 | 0 | 0 | 0 | 0.7 | 0 | 0 | 0 | 0 | 0 | 0 | 0 | 0 | 0 |
| 628 | 0 | 0 | 0 | 0 | 0 | 0 | 0 | 0 | 0 | 0 | 0.7 | 0 | 1 | 0 | 0 | 0 | 0 | 0 | 0 | 0 | 0 |
| 629 | 0 | 0 | 0 | 0 | 0 | 0 | 0 | 0 | 1 | 0 | 0 | 0 | 0 | 0 | 0 | 0 | 0 | 0 | 0.7 | 0 | 0 |
| 630 | 0 | 0 | 0 | 0 | 0 | 0.7 | 0 | 0 | 0 | 0 | 0 | 0 | 0 | 0 | 0 | 0 | 0 | 0 | 0 | 0 | 0 |
| 631 | 0 | 0 | 0 | 0 | 0 | 0 | 0 | 0 | 0 | 0.7 | 1 | 0 | 0 | 0 | 0 | 0 | 0 | 0 | 0 | 0 | 0 |
| 632 | 0 | 0 | 0 | 0 | 0 | 0 | 0 | 0 | 0 | 0.7 | 0 | 0 | 0 | 0 | 0 | 0 | 0 | 0 | 0 | 1 | 0 |
| 633 | 0 | 0 | 0 | 1 | 0 | 0 | 1 | 0 | 0.7 | 0 | 0 | 0 | 0 | 0 | 0 | 0 | 0 | 0 | 0 | 0 | 0 |
| 634 | 0 | 0 | 0 | 0 | 0 | 0.7 | 1 | 0 | 0 | 0 | 0 | 0 | 0 | 0 | 0 | 0 | 0 | 0 | 0 | 0 | 0 |
| 635 | 0 | 0 | 0 | 0 | 0 | 0 | 0 | 0 | 0 | 0 | 0 | 0 | 0 | 0 | 0 | 0 | 0 | 0 | 0.7 | 0 | 0 |
| 636 | 0 | 0 | 0.7 | 0 | 0 | 1 | 0 | 0 | 0 | 0 | 0 | 0 | 0 | 0 | 0 | 0 | 0 | 0 | 0 | 0 | 0 |
| 637 | 0 | 0 | 0 | 0 | 0 | 0 | 0 | 0 | 0 | 0 | 0.7 | 0 | 0 | 0 | 0 | 0 | 0 | 0 | 0 | 0 | 0 |
| 638 | 0 | 0 | 1 | 0 | 0 | 1 | 0 | 0 | 0.7 | 0 | 0 | 1 | 0 | 0 | 0 | 1 | 0 | 0 | 0 | 0 | 0 |
| 639 | 0 | 0 | 0 | 0 | 0 | 0 | 0 | 0.7 | 0 | 0 | 0 | 0 | 0 | 0 | 0 | 0 | 0 | 0 | 0 | 0 | 0 |
| 640 | 0 | 0 | 0 | 0 | 0 | 0 | 0 | 0 | 0 | 0 | 0 | 0.7 | 0 | 0 | 0 | 0 | 0 | 0 | 0 | 0 | 0 |
| 641 | 0 | 0 | 0 | 0 | 0 | 0 | 0 | 0 | 0 | 0.7 | 0 | 0 | 0 | 0 | 0 | 0 | 0 | 0 | 0 | 1 | 0 |
| 642 | 0 | 0.7 | 0 | 0 | 0 | 0 | 0 | 0 | 0 | 0 | 0 | 0 | 0 | 0 | 0 | 0 | 0 | 0 | 0 | 0 | 0 |
| 643 | 0 | 0 | 0 | 0 | 0 | 0 | 0 | 0 | 0 | 0 | 1 | 0 | 0 | 0 | 0 | 0 | 0 | 0.7 | 0 | 0 | 0 |
| 644 | 0 | 0 | 0 | 0 | 0 | 0 | 0 | 0 | 0 | 0 | 0.7 | 0 | 0 | 0 | 0 | 0 | 0 | 0 | 0 | 0 | 0 |
| 645 | 0 | 0 | 0 | 0 | 0 | 0 | 0 | 0.7 | 0 | 0 | 0 | 0 | 0 | 0 | 0 | 0 | 0 | 0 | 0 | 0 | 0 |
| 646 | 0 | 0 | 0 | 0 | 0 | 0 | 0 | 0 | 0 | 0.7 | 0 | 0 | 0 | 0 | 0 | 0 | 0 | 0 | 0 | 0 | 0 |
| 647 | 0 | 0.7 | 0 | 0 | 0 | 0 | 0 | 0 | 0 | 0 | 0 | 0 | 0 | 0 | 0 | 0 | 0 | 0 | 0 | 0 | 0 |
| 648 | 0 | 0 | 0 | 0 | 0 | 0 | 0 | 0 | 0 | 0 | 0.7 | 0 | 0 | 0 | 0 | 0 | 0 | 0 | 0 | 0 | 0 |
| 649 | 0 | 0 | 0 | 0 | 0 | 0 | 0 | 0 | 0 | 0 | 0 | 0 | 0 | 0 | 0.7 | 0 | 0 | 0 | 0 | 0 | 0 |
| 650 | 0 | 0 | 0 | 0 | 0 | 0 | 0 | 0 | 0 | 0 | 0 | 0.7 | 0 | 0 | 0 | 0 | 0 | 0 | 0 | 0 | 0 |
| 651 | 0.7 | 0 | 1 | 0 | 0 | 0 | 0 | 1 | 0 | 1 | 0 | 0 | 0 | 0 | 0 | 0 | 0 | 0 | 0 | 0 | 0 |
| 652 | 0 | 0 | 0 | 0.7 | 0 | 0 | 0 | 0 | 0 | 0 | 0 | 0 | 0 | 0 | 0 | 0 | 0 | 0 | 0 | 0 | 0 |
| 653 | 0 | 0 | 0 | 0 | 0 | 0 | 0 | 0 | 0 | 0 | 0 | 0 | 0 | 0 | 0 | 0.7 | 0 | 0 | 0 | 0 | 0 |
| 654 | 0 | 0 | 0 | 0 | 0 | 0 | 0 | 0.7 | 0 | 0 | 0 | 0 | 0 | 0 | 0 | 0 | 0 | 0 | 0 | 0 | 0 |
| 655 | 0 | 0 | 0 | 0 | 0 | 0 | 0.7 | 0 | 0 | 0 | 0 | 0 | 0 | 0 | 0 | 0 | 0 | 0 | 0 | 0 | 0 |
| 656 | 0 | 0 | 0 | 0 | 0 | 0 | 0 | 0 | 0 | 0.7 | 0 | 0 | 0 | 0 | 0 | 0 | 0 | 0 | 0 | 1 | 0 |
| 657 | 0 | 0 | 0 | 0 | 0 | 0 | 0 | 0 | 0 | 0 | 0 | 0 | 0 | 0 | 0 | 0 | 0 | 0 | 0.7 | 0 | 0 |
| 658 | 0 | 0.7 | 0 | 0 | 0 | 0 | 0 | 0 | 0 | 0 | 0 | 0 | 0 | 0 | 0 | 0 | 0 | 0 | 0 | 0 | 0 |
| 659 | 0 | 0 | 0 | 0 | 0 | 0 | 0 | 0 | 0 | 0.7 | 0 | 0 | 0 | 0 | 0 | 0 | 0 | 0 | 0 | 1 | 0 |
| 660 | 0 | 0 | 0 | 0 | 0 | 0 | 0 | 0 | 0 | 0.7 | 0 | 0 | 0 | 0 | 0 | 0 | 0 | 0 | 0 | 0 | 0 |
| 661 | 0.7 | 0 | 0 | 0 | 0 | 0 | 0 | 0 | 0 | 0 | 0 | 0 | 0 | 0 | 0 | 0 | 0 | 0 | 0 | 0 | 0 |
| 662 | 0 | 0 | 0 | 0.7 | 0 | 0 | 0 | 0 | 0 | 0 | 0 | 0 | 0 | 0 | 0 | 0 | 0 | 0 | 0 | 0 | 0 |
| 663 | 0 | 0.7 | 0 | 0 | 0 | 0 | 0 | 0 | 1 | 0 | 0 | 0 | 0 | 0 | 0 | 0 | 0 | 0 | 0 | 0 | 0 |
| 664 | 0 | 0 | 0 | 0 | 0 | 0.7 | 0 | 1 | 0 | 0 | 0 | 0 | 0 | 0 | 0 | 0 | 0 | 0 | 0 | 0 | 0 |
| 665 | 0 | 0 | 0 | 0 | 0 | 0 | 0 | 0.7 | 0 | 0 | 0 | 0 | 0 | 0 | 0 | 0 | 0 | 0 | 0 | 0 | 0 |
| 666 | 0 | 0 | 0 | 0 | 0 | 0 | 0 | 0 | 0 | 0.7 | 0 | 0 | 0 | 0 | 0 | 0 | 0 | 0 | 0 | 1 | 0 |
| 667 | 0 | 0 | 0 | 0 | 0 | 0 | 0 | 0 | 0 | 0 | 0 | 0 | 0 | 0.7 | 0 | 0 | 0 | 0 | 0 | 0 | 0 |
| 668 | 0 | 0 | 0 | 0 | 0 | 0 | 0 | 0 | 0 | 0 | 0 | 0 | 0 | 0 | 0 | 0 | 0 | 0 | 0 | 0.7 | 0 |
| 669 | 0 | 0 | 0 | 0 | 0 | 0.7 | 0 | 0 | 0 | 0 | 0 | 0 | 0 | 0 | 0 | 0 | 0 | 0 | 0 | 0 | 0 |
| 670 | 0 | 0 | 0 | 0 | 0 | 0 | 0 | 0 | 0 | 0 | 0 | 0 | 0 | 0 | 0.7 | 0 | 0 | 0 | 0 | 0 | 0 |
| 671 | 0.7 | 0 | 0 | 0 | 0 | 0 | 0 | 0 | 0 | 0 | 0 | 0 | 0 | 0 | 0 | 0 | 0 | 0 | 0 | 0 | 0 |
| 672 | 0 | 0 | 0 | 0 | 0 | 0 | 0 | 0 | 0 | 0 | 0.7 | 0 | 0 | 0 | 0 | 0 | 0 | 0 | 0 | 0 | 0 |
| 673 | 0 | 0 | 0 | 0 | 0 | 0 | 0 | 0 | 0 | 0 | 0 | 0 | 0 | 0.7 | 0 | 0 | 0 | 0 | 0 | 0 | 0 |
| 674 | 0 | 0 | 0 | 0 | 0 | 0 | 0.7 | 0 | 0 | 0 | 0 | 0 | 0 | 0 | 0 | 0 | 0 | 0 | 0 | 0 | 0 |
| 675 | 0.7 | 0 | 0 | 0 | 0 | 0 | 0 | 0 | 0 | 0 | 0 | 0 | 0 | 0 | 0 | 0 | 0 | 0 | 0 | 0 | 0 |
| 676 | 0 | 0 | 0 | 0 | 0 | 0 | 0 | 0 | 0 | 0 | 0 | 0 | 0 | 0.7 | 0 | 0 | 0 | 0 | 0 | 0 | 0 |
| 677 | 0 | 0 | 0 | 0 | 0 | 0 | 0 | 0.7 | 0 | 0 | 0 | 0 | 0 | 0 | 0 | 0 | 0 | 0 | 0 | 0 | 0 |
| 678 | 0 | 0 | 0 | 0 | 0 | 0 | 0 | 0 | 0 | 0 | 0.7 | 0 | 0 | 0 | 0 | 0 | 0 | 0 | 0 | 0 | 0 |
| 679 | 0 | 0 | 0 | 0 | 0 | 0 | 0 | 0 | 0 | 0 | 0 | 0 | 0 | 0 | 0 | 0 | 0.7 | 0 | 0 | 0 | 0 |
| 680 | 0 | 0 | 0 | 0 | 0 | 0 | 0 | 0 | 0 | 0.7 | 0 | 0 | 0 | 0 | 0 | 0 | 0 | 0 | 0 | 0 | 0 |
| 681 | 0 | 0 | 0 | 0 | 0 | 0 | 0 | 0 | 0 | 0 | 0.7 | 0 | 0 | 0 | 0 | 0 | 0 | 0 | 0 | 0 | 0 |
| 682 | 0 | 0 | 0 | 0 | 0 | 0 | 0.7 | 0 | 0 | 0 | 0 | 0 | 0 | 0 | 0 | 0 | 0 | 0 | 0 | 0 | 0 |
| 683 | 0.7 | 0 | 0 | 0 | 0 | 0 | 0 | 0 | 0 | 0 | 0 | 0 | 0 | 0 | 0 | 1 | 0 | 0 | 0 | 0 | 0 |
| 684 | 0 | 0 | 0 | 0 | 0 | 0 | 0 | 0 | 0 | 0 | 0 | 0 | 0.7 | 0 | 0 | 0 | 0 | 0 | 0 | 0 | 0 |
| 685 | 0 | 0 | 0 | 0 | 0 | 0 | 0 | 0 | 0 | 0.7 | 0 | 0 | 0 | 0 | 0 | 0 | 0 | 0 | 0 | 0 | 0 |
| 686 | 0 | 0 | 0 | 0 | 0 | 0 | 0 | 0 | 0 | 0 | 0 | 0 | 0 | 0 | 0 | 0.7 | 1 | 0 | 0 | 0 | 0 |
| 687 | 0 | 0 | 0 | 0 | 0 | 0 | 0 | 0.7 | 0 | 0 | 0 | 0 | 0 | 0 | 0 | 0 | 0 | 0 | 0 | 0 | 0 |
| 688 | 0 | 0 | 0 | 0 | 0 | 0 | 0 | 0 | 0 | 0 | 0.7 | 0 | 0 | 0 | 0 | 0 | 0 | 0 | 0 | 0 | 0 |
| 689 | 0 | 0 | 0 | 0 | 0 | 0 | 0 | 0 | 0 | 0 | 0 | 0 | 0 | 0 | 0.7 | 0 | 0 | 0 | 0 | 0 | 0 |
| 690 | 0 | 0 | 0 | 0 | 0 | 0 | 0 | 0 | 0 | 0 | 0 | 0 | 0 | 0 | 0 | 0 | 0.7 | 0 | 0 | 0 | 0 |
| 691 | 0 | 0 | 0 | 0 | 0 | 0 | 0 | 0 | 0 | 0 | 0 | 0 | 0 | 0.7 | 0 | 0 | 0 | 0 | 0 | 0 | 0 |
| 692 | 1 | 0 | 0 | 0 | 0 | 0 | 0 | 0.7 | 0 | 0 | 0 | 0 | 0 | 0 | 0 | 0 | 0 | 0 | 0 | 0 | 0 |
| 693 | 0 | 0 | 0 | 0 | 0 | 0 | 0 | 0 | 0 | 0 | 0 | 0 | 0 | 0 | 0 | 0 | 0.7 | 0 | 0 | 0 | 0 |
| 694 | 0 | 0.7 | 0 | 0 | 0 | 1 | 0 | 0 | 0 | 0 | 0 | 0 | 0 | 0 | 0 | 0 | 0 | 0 | 0 | 0 | 0 |
| 695 | 0 | 0 | 0 | 0 | 0 | 0 | 0 | 0 | 0 | 0 | 0 | 0 | 0 | 0.7 | 0 | 0 | 0 | 0 | 0 | 0 | 0 |
| 696 | 0 | 0 | 0 | 0 | 0 | 0 | 0 | 0.7 | 0 | 0 | 0 | 0 | 0 | 0 | 0 | 0 | 0 | 0 | 0 | 0 | 0 |
| 697 | 0 | 0 | 0 | 0 | 0 | 0 | 0 | 0.7 | 0 | 0 | 0 | 0 | 0 | 0 | 0 | 0 | 0 | 0 | 0 | 0 | 0 |
| 698 | 0 | 0 | 0 | 0 | 0 | 0 | 0 | 0 | 0 | 0 | 0 | 0 | 0 | 0 | 0.7 | 0 | 0 | 0 | 0 | 0 | 0 |
| 699 | 0 | 0 | 0 | 0 | 0 | 0 | 0 | 0 | 0 | 0 | 0.7 | 0 | 0 | 0 | 0 | 0 | 0 | 0 | 0 | 0 | 0 |
| 700 | 0 | 0 | 0 | 0 | 0 | 0 | 0.7 | 0 | 0 | 0 | 0 | 0 | 0 | 0 | 0 | 0 | 0 | 0 | 0 | 0 | 0 |
| 701 | 0 | 0 | 0 | 0 | 0 | 0 | 0 | 0 | 0 | 0.7 | 0 | 0 | 0 | 0 | 0 | 0 | 0 | 0 | 0 | 0 | 0 |
| 702 | 0 | 0 | 0 | 0 | 0 | 0 | 0 | 0 | 0 | 0.7 | 0 | 0 | 0 | 0 | 0 | 0 | 0 | 0 | 0 | 0 | 0 |
| 703 | 0 | 0 | 0 | 0 | 0 | 0.7 | 0 | 0 | 0 | 0 | 0 | 0 | 0 | 0 | 0 | 0 | 0 | 0 | 0 | 0 | 0 |
| 704 | 0 | 0 | 1 | 0.7 | 0 | 0 | 0 | 0 | 1 | 0 | 0 | 0 | 0 | 0 | 0 | 0 | 0 | 0 | 0 | 0 | 0 |
| 705 | 0 | 0 | 0 | 0 | 0 | 1 | 0 | 0.7 | 0 | 0 | 0 | 0 | 0 | 0 | 0 | 0 | 0 | 0 | 0 | 0 | 0 |
| 706 | 0 | 0 | 0 | 0 | 0 | 0 | 0 | 0 | 0 | 0 | 0 | 1 | 0 | 0 | 0 | 0 | 0 | 0 | 0 | 0.7 | 0 |
| 707 | 0 | 0 | 0.7 | 0 | 0 | 0 | 0 | 0 | 0 | 0 | 0 | 0 | 0 | 0 | 0 | 0 | 0 | 0 | 0 | 0 | 0 |
| 708 | 0 | 0 | 0 | 0 | 0 | 0 | 0 | 0.7 | 0 | 0 | 0 | 0 | 0 | 0 | 0 | 0 | 0 | 0 | 0 | 0 | 0 |
| 709 | 0 | 0 | 0 | 0 | 0 | 0 | 0 | 0 | 0 | 0 | 0 | 0 | 0 | 0.7 | 0 | 0 | 0 | 0 | 0 | 0 | 0 |
| 710 | 0 | 0 | 0 | 0 | 0 | 0 | 0 | 0 | 1 | 0 | 0 | 0 | 0 | 0 | 0 | 0 | 0 | 0 | 0.7 | 0 | 0 |
| 711 | 0 | 0 | 0 | 0 | 0 | 0 | 0 | 0 | 0 | 0.7 | 0 | 0 | 0 | 0 | 0 | 0 | 0 | 0 | 0 | 0 | 0 |
| 712 | 0 | 0 | 0.7 | 0 | 0 | 0 | 0 | 0 | 0 | 0 | 0 | 0 | 0 | 0 | 0 | 0 | 0 | 0 | 0 | 0 | 0 |
| 713 | 0 | 0 | 0 | 0 | 0 | 0 | 0 | 0 | 0 | 0 | 0 | 0 | 0 | 0 | 0.7 | 0 | 0 | 0 | 0 | 0 | 0 |
| 714 | 0 | 0 | 0 | 0 | 0 | 0 | 0 | 0 | 0 | 0 | 0 | 0 | 0 | 0 | 0 | 0 | 0.7 | 0 | 0 | 0 | 0 |
| 715 | 0 | 0 | 0 | 1 | 0 | 0 | 0 | 0 | 0.7 | 0 | 0 | 0 | 0 | 0 | 0 | 0 | 0 | 0 | 0 | 0 | 0 |
| 716 | 0 | 0 | 0 | 0 | 0 | 0 | 0 | 0 | 0 | 0 | 0.7 | 0 | 0 | 0 | 0 | 0 | 0 | 0 | 0 | 0 | 0 |
| 717 | 0 | 0 | 0 | 0 | 0 | 0 | 0.7 | 0 | 0 | 0 | 0 | 0 | 0 | 0 | 0 | 0 | 0 | 0 | 0 | 0 | 0 |
| 718 | 0 | 0 | 0 | 0 | 0 | 0 | 0.7 | 0 | 0 | 0 | 0 | 0 | 0 | 0 | 0 | 0 | 0 | 0 | 0 | 0 | 0 |
| 719 | 0 | 0 | 0 | 0 | 0 | 0 | 0 | 0 | 0 | 0 | 0 | 0 | 0.7 | 0 | 0 | 0 | 1 | 0 | 0 | 0 | 0 |
| 720 | 0.7 | 0 | 0 | 0 | 0 | 0 | 0 | 0 | 0 | 0 | 0 | 0 | 0 | 0 | 0 | 0 | 0 | 0 | 0 | 0 | 0 |
| 721 | 0 | 0 | 0 | 0 | 0 | 0 | 0.7 | 0 | 0 | 0 | 0 | 0 | 0 | 0 | 0 | 0 | 0 | 0 | 0 | 0 | 0 |
| 722 | 1 | 0 | 0 | 0 | 0 | 0 | 0 | 0 | 0 | 0 | 0 | 1 | 0 | 0 | 0 | 0 | 0.7 | 0 | 0 | 0 | 0 |
| 723 | 0 | 0 | 0 | 0 | 0 | 0 | 0 | 0 | 0 | 0.7 | 0 | 0 | 0 | 0 | 0 | 0 | 0 | 0 | 0 | 0 | 0 |
| 724 | 0 | 0 | 0 | 0 | 0 | 0 | 0 | 0 | 0 | 0 | 1 | 0 | 1 | 1 | 0 | 0 | 0 | 0 | 0 | 0.7 | 0 |
| 725 | 0 | 0.7 | 0 | 0 | 0 | 0 | 0 | 0 | 0 | 0 | 0 | 1 | 0 | 0 | 0 | 0 | 0 | 0 | 0 | 0 | 0 |
| 726 | 0 | 0 | 0 | 0 | 0 | 0 | 0 | 0 | 0 | 0 | 0 | 0 | 0 | 0.7 | 0 | 0 | 0 | 0 | 0 | 0 | 0 |
| 727 | 0 | 0 | 0 | 0 | 0 | 0 | 0 | 0 | 0 | 1 | 0.7 | 0 | 0 | 0 | 0 | 0 | 0 | 0 | 0 | 0 | 0 |
| 728 | 1 | 0 | 0 | 0 | 0 | 0 | 0.7 | 0 | 0 | 0 | 0 | 0 | 0 | 0 | 0 | 0 | 0 | 0 | 0 | 0 | 0 |
| 729 | 0.7 | 1 | 0 | 0 | 0 | 1 | 0 | 0 | 1 | 0 | 0 | 1 | 0 | 0 | 0 | 0 | 0 | 0 | 0 | 0 | 0 |
| 730 | 0 | 0 | 0 | 0 | 0.7 | 0 | 0 | 0 | 0 | 0 | 0 | 0 | 0 | 0 | 0 | 0 | 0 | 0 | 0 | 0 | 0 |
| 731 | 0 | 0 | 1 | 0.7 | 0 | 0 | 0 | 0 | 0 | 0 | 0 | 0 | 0 | 0 | 0 | 0 | 0 | 0 | 0 | 0 | 0 |
| 732 | 0 | 0.7 | 0 | 0 | 0 | 0 | 0 | 0 | 1 | 0 | 0 | 1 | 0 | 0 | 0 | 0 | 0 | 0 | 0 | 0 | 0 |
| 733 | 0 | 0 | 0 | 0.7 | 0 | 0 | 0 | 0 | 0 | 0 | 0 | 0 | 0 | 0 | 0 | 0 | 0 | 0 | 0 | 0 | 0 |
| 734 | 0 | 0 | 0 | 0 | 0 | 0 | 0 | 0 | 0 | 0 | 0 | 0 | 0 | 0 | 0.7 | 0 | 0 | 0 | 0 | 0 | 0 |
| 735 | 0 | 0 | 1 | 0 | 0 | 0.7 | 1 | 0 | 0 | 0 | 0 | 0 | 0 | 0 | 0 | 0 | 0 | 0 | 0 | 0 | 0 |
| 736 | 0 | 0 | 0 | 0 | 0 | 1 | 0.7 | 0 | 1 | 0 | 0 | 0 | 0 | 0 | 0 | 0 | 0 | 0 | 1 | 0 | 0 |
| 737 | 0 | 0 | 0 | 0 | 0 | 0 | 0 | 0 | 0 | 0 | 0 | 0 | 0 | 0 | 0 | 0 | 0 | 0.7 | 0 | 0 | 0 |
| 738 | 0 | 0 | 0 | 0 | 0 | 0.7 | 1 | 0 | 0 | 0 | 0 | 0 | 0 | 0 | 0 | 0 | 0 | 0 | 1 | 0 | 0 |
| 739 | 0 | 0.7 | 0 | 0 | 0 | 0 | 1 | 0 | 0 | 0 | 0 | 0 | 0 | 0 | 0 | 0 | 0 | 0 | 0 | 0 | 0 |
| 740 | 0 | 0 | 0 | 0 | 0 | 0 | 0 | 0 | 0 | 0.7 | 1 | 0 | 0 | 0 | 0 | 0 | 0 | 0 | 0 | 0 | 0 |
| 741 | 0 | 0 | 0 | 0 | 0 | 0 | 0 | 0 | 0 | 0 | 0 | 0 | 0 | 0 | 0 | 0.7 | 0 | 0 | 0 | 0 | 0 |
| 742 | 0 | 0 | 0 | 0 | 0 | 1 | 1 | 0 | 0 | 0 | 0 | 0.7 | 0 | 0 | 0 | 0 | 0 | 0 | 0 | 0 | 0 |
| 743 | 0.7 | 0 | 0 | 0 | 0 | 0 | 0 | 0 | 0 | 0 | 0 | 1 | 0 | 0 | 0 | 0 | 0 | 0 | 0 | 0 | 0 |
| 744 | 1 | 0 | 0 | 0 | 0 | 0 | 0 | 0.7 | 0 | 0 | 0 | 0 | 0 | 0 | 0 | 1 | 0 | 0 | 0 | 0 | 0 |
| 745 | 0 | 0 | 0 | 0 | 0 | 0 | 0 | 0 | 0 | 0.7 | 0 | 0 | 0 | 0 | 0 | 0 | 0 | 0 | 0 | 0 | 0 |
| 746 | 0 | 0 | 0 | 0 | 0 | 1 | 0.7 | 0 | 0 | 0 | 0 | 0 | 0 | 0 | 0 | 0 | 0 | 0 | 0 | 0 | 0 |
| 747 | 0 | 0.7 | 0 | 0 | 0 | 0 | 0 | 0 | 0 | 0 | 0 | 0 | 0 | 0 | 0 | 0 | 0 | 0 | 0 | 0 | 0 |
| 748 | 0 | 0 | 0 | 0 | 0 | 0 | 0 | 0 | 0 | 0 | 0 | 0 | 0 | 0 | 0 | 0 | 0 | 0 | 0 | 0.7 | 0 |
| 749 | 0 | 1 | 0 | 0 | 0 | 0 | 0 | 0 | 0 | 0 | 0 | 0 | 0 | 0 | 0 | 0 | 0 | 0 | 0.7 | 0 | 0 |
| 750 | 0 | 0 | 0 | 0 | 0 | 0 | 1 | 0 | 0 | 0 | 0 | 0 | 0 | 0 | 0 | 0.7 | 0 | 0 | 0 | 0 | 0 |
| 751 | 0 | 0 | 1 | 0 | 0 | 0 | 0 | 0 | 0 | 0 | 0 | 1 | 0 | 0 | 0 | 0 | 0.7 | 0 | 0 | 0 | 0 |
| 752 | 0 | 0 | 0 | 0 | 0 | 0 | 0 | 0 | 0 | 0 | 0 | 0 | 0 | 0 | 0 | 0 | 0 | 0 | 0.7 | 0 | 0 |
| 753 | 0 | 0 | 0 | 0 | 0 | 0 | 0 | 0 | 0 | 0 | 0 | 0 | 0 | 0 | 0 | 0 | 0.7 | 0 | 0 | 0 | 0 |
| 754 | 0 | 0 | 0 | 0 | 0 | 0 | 0 | 0 | 0 | 0 | 0 | 0 | 0 | 0 | 0 | 0 | 0 | 0.7 | 0 | 0 | 0 |
| 755 | 0 | 0 | 0 | 0 | 0 | 0 | 0 | 0 | 0 | 0 | 0 | 0.7 | 0 | 0 | 0 | 0 | 0 | 0 | 0 | 0 | 0 |
| 756 | 0 | 0 | 0 | 0 | 0 | 0 | 0 | 0 | 0 | 0.7 | 0 | 0 | 0 | 0 | 0 | 0 | 0 | 0 | 0 | 0 | 0 |
| 757 | 0 | 0 | 0 | 0 | 0 | 0 | 0 | 0 | 0.7 | 0 | 0 | 0 | 0 | 1 | 0 | 0 | 0 | 0 | 1 | 0 | 0 |
| 758 | 1 | 0 | 0 | 0 | 0.7 | 0 | 0 | 0 | 0 | 0 | 0 | 0 | 0 | 0 | 0 | 0 | 1 | 0 | 0 | 0 | 0 |
| 759 | 0 | 0 | 0 | 0 | 0 | 0 | 1 | 0 | 0 | 0 | 0 | 1 | 0 | 0 | 0 | 1 | 0.7 | 0 | 0 | 0 | 0 |
| 760 | 0 | 0.7 | 0 | 0 | 0 | 0 | 0 | 0 | 0 | 0 | 0 | 1 | 0 | 0 | 0 | 0 | 0 | 0 | 0 | 0 | 0 |
| 761 | 0 | 0 | 0 | 0 | 0 | 0 | 0 | 0 | 0 | 1 | 0.7 | 0 | 1 | 0 | 0 | 0 | 0 | 0 | 0 | 0 | 0 |
| 762 | 0 | 0 | 0 | 0 | 0 | 0 | 0 | 0 | 0 | 0 | 0.7 | 0 | 1 | 0 | 0 | 0 | 0 | 0 | 0 | 0 | 0 |
| 763 | 0 | 0 | 0 | 0 | 0 | 0 | 0 | 0 | 0 | 0 | 0 | 0 | 0 | 0 | 0 | 0.7 | 1 | 0 | 0 | 0 | 0 |
| 764 | 0 | 0 | 0 | 0 | 0 | 0 | 0 | 0 | 0 | 0 | 0.7 | 0 | 0 | 0 | 0 | 0 | 0 | 0 | 0 | 0 | 0 |
| 765 | 0.7 | 0 | 0 | 0 | 0 | 0 | 0 | 0 | 0 | 0 | 0 | 0 | 0 | 0 | 0 | 1 | 0 | 0 | 0 | 0 | 0 |
| 766 | 0 | 1 | 0 | 0 | 0 | 0 | 0 | 0 | 0 | 0 | 0 | 0.7 | 0 | 0 | 0 | 0 | 0 | 0 | 0 | 0 | 0 |
| 767 | 0 | 0 | 0 | 0 | 0 | 0 | 0 | 0 | 0 | 0.7 | 0 | 0 | 0 | 0 | 0 | 0 | 0 | 0 | 0 | 0 | 0 |
| 768 | 0 | 0 | 0 | 0 | 0 | 0 | 0 | 0 | 0 | 0 | 0 | 0 | 1 | 0 | 0 | 0 | 0 | 0 | 0.7 | 0 | 0 |
| 769 | 0 | 0 | 0 | 0 | 0 | 0 | 0 | 0.7 | 0 | 0 | 0 | 0 | 0 | 0 | 0 | 0 | 0 | 0 | 0 | 0 | 0 |
| 770 | 0 | 0 | 0 | 0 | 0 | 0 | 0 | 0 | 0 | 0 | 0 | 0 | 0 | 0.7 | 0 | 0 | 0 | 0 | 0 | 0 | 0 |
| 771 | 0 | 0 | 0 | 0 | 0 | 0 | 0 | 0 | 0 | 0 | 0 | 0 | 0 | 0 | 0 | 0 | 0 | 0.7 | 0 | 0 | 0 |
| 772 | 0 | 0 | 0.7 | 0 | 0 | 0 | 0 | 0 | 0 | 0 | 0 | 0 | 0 | 0 | 0 | 0 | 0 | 0 | 0 | 0 | 0 |
| 773 | 0 | 0 | 0 | 0 | 0 | 0 | 0 | 0 | 0 | 0 | 0 | 0 | 0 | 0.7 | 0 | 0 | 0 | 0 | 0 | 0 | 0 |
| 774 | 0 | 0 | 0 | 0 | 0 | 0 | 0 | 0 | 0 | 1 | 0 | 0 | 1 | 0 | 0 | 0.7 | 1 | 0 | 0 | 1 | 0 |
| 775 | 0 | 0 | 0 | 0 | 0 | 0 | 0 | 0 | 0 | 0 | 0 | 0 | 0 | 0 | 0 | 0.7 | 0 | 0 | 0 | 0 | 0 |
| 776 | 0 | 0 | 0 | 0 | 0 | 0.7 | 0 | 0 | 0 | 0 | 0 | 0 | 0 | 0 | 0 | 0 | 0 | 0 | 0 | 0 | 0 |
| 777 | 0 | 0 | 0 | 0 | 0 | 0 | 0.7 | 0 | 0 | 0 | 0 | 0 | 0 | 0 | 0 | 0 | 0 | 0 | 0 | 0 | 0 |
| 778 | 0 | 0 | 0.7 | 0 | 0 | 0 | 0 | 0 | 0 | 0 | 0 | 0 | 0 | 0 | 0 | 0 | 0 | 0 | 0 | 0 | 0 |
| 779 | 0 | 0.7 | 0 | 0 | 0 | 0 | 0 | 0 | 0 | 0 | 0 | 0 | 0 | 0 | 0 | 0 | 0 | 0 | 0 | 0 | 0 |
| 780 | 0 | 0 | 0 | 0 | 0 | 0 | 0.7 | 0 | 0 | 0 | 0 | 0 | 0 | 0 | 0 | 0 | 0 | 0 | 0 | 0 | 0 |
| 781 | 0 | 0 | 0 | 0.7 | 0 | 0 | 0 | 0 | 0 | 0 | 0 | 0 | 0 | 0 | 0 | 0 | 0 | 0 | 0 | 0 | 0 |
| 782 | 0 | 0 | 0 | 0 | 0 | 0 | 0 | 0 | 0 | 0 | 1 | 0 | 0.7 | 0 | 0 | 0 | 0 | 0 | 0 | 0 | 0 |
| 783 | 0 | 0 | 0 | 0 | 0 | 0 | 0 | 0 | 0 | 0 | 1 | 0 | 0.7 | 0 | 0 | 0 | 0 | 1 | 0 | 0 | 0 |
| 784 | 0 | 0.7 | 0 | 0 | 0 | 0 | 0 | 0 | 0 | 0 | 0 | 0 | 0 | 0 | 0 | 0 | 0 | 0 | 0 | 0 | 0 |
| 785 | 0 | 0 | 0 | 0 | 0 | 0 | 0 | 0 | 0 | 0 | 0 | 0 | 0 | 0 | 0 | 0 | 0 | 0 | 0.7 | 0 | 0 |
| 786 | 0 | 0 | 0 | 0 | 0 | 0 | 0 | 0 | 0 | 1 | 1 | 0 | 0.7 | 0 | 0 | 0 | 0 | 0 | 0 | 0 | 0 |
| 787 | 0 | 0 | 0 | 0 | 0 | 0 | 0.7 | 0 | 0 | 0 | 0 | 0 | 0 | 0 | 0 | 0 | 0 | 0 | 0 | 0 | 0 |
| 788 | 0.7 | 0 | 0 | 0 | 0 | 0 | 0 | 0 | 0 | 0 | 0 | 0 | 0 | 0 | 0 | 0 | 0 | 0 | 0 | 0 | 0 |
| 789 | 0 | 0 | 0 | 0 | 0 | 0 | 0 | 0 | 0 | 0 | 0.7 | 0 | 1 | 0 | 0 | 0 | 0 | 0 | 0 | 0 | 0 |
| 790 | 0 | 0 | 0 | 0 | 0 | 0 | 0 | 0 | 0 | 0 | 0 | 0 | 0 | 0.7 | 0 | 0 | 0 | 0 | 1 | 0 | 0 |
| 791 | 0 | 0 | 0 | 0 | 0 | 0 | 0 | 0 | 0.7 | 0 | 0 | 0 | 0 | 0 | 0 | 0 | 0 | 0 | 0 | 0 | 0 |
| 792 | 0 | 0 | 0 | 0 | 0 | 0 | 0 | 0 | 0 | 0 | 0.7 | 0 | 0 | 0 | 0 | 0 | 0 | 0 | 0 | 0 | 0 |
| 793 | 0 | 0 | 0 | 0 | 0 | 0 | 0 | 0 | 0 | 0 | 0.7 | 0 | 0 | 0 | 0 | 0 | 0 | 0 | 0 | 0 | 0 |
| 794 | 0 | 0 | 0 | 0 | 0 | 0 | 0 | 0 | 0 | 0 | 0 | 0 | 0 | 1 | 0 | 0 | 0 | 0 | 0.7 | 0 | 0 |
| 795 | 0 | 0 | 0 | 0 | 0 | 0 | 0 | 0 | 0 | 0 | 0 | 0.7 | 0 | 0 | 0 | 0 | 0 | 0 | 0 | 0 | 0 |
| 796 | 0 | 0 | 0 | 0 | 0 | 0 | 0 | 0 | 0 | 0 | 0 | 0 | 0 | 0 | 0.7 | 0 | 0 | 0 | 0 | 0 | 0 |
| 797 | 0 | 0.7 | 0 | 0 | 0 | 0 | 0 | 0 | 0 | 0 | 0 | 0 | 0 | 0 | 0 | 0 | 0 | 0 | 0 | 0 | 0 |
| 798 | 0.7 | 0 | 0 | 0 | 0 | 0 | 0 | 0 | 0 | 0 | 0 | 0 | 0 | 0 | 0 | 0 | 0 | 0 | 0 | 0 | 0 |
| 799 | 0 | 0 | 0 | 0 | 0 | 0.7 | 0 | 0 | 0 | 0 | 0 | 0 | 0 | 0 | 0 | 0 | 0 | 0 | 0 | 0 | 0 |
| 800 | 0.7 | 1 | 0 | 0 | 0 | 1 | 0 | 0 | 0 | 0 | 0 | 1 | 0 | 0 | 0 | 0 | 0 | 0 | 0 | 0 | 0 |
| 801 | 0 | 0 | 0 | 0 | 0 | 0 | 0 | 0 | 0 | 0 | 0.7 | 0 | 0 | 0 | 0 | 0 | 0 | 0 | 0 | 0 | 0 |
| 802 | 0 | 0 | 0 | 0 | 0 | 0 | 0 | 0 | 0 | 0 | 0.7 | 0 | 0 | 0 | 0 | 0 | 0 | 0 | 0 | 0 | 0 |
| 803 | 0.7 | 0 | 0 | 0 | 0 | 0 | 0 | 0 | 0 | 0 | 0 | 0 | 0 | 0 | 0 | 0 | 0 | 0 | 0 | 0 | 0 |
| 804 | 0 | 0 | 0 | 0 | 0 | 0 | 0.7 | 0 | 0 | 0 | 0 | 0 | 0 | 0 | 0 | 0 | 0 | 0 | 0 | 0 | 0 |
| 805 | 0 | 0 | 0 | 0 | 0 | 0 | 0 | 0 | 0.7 | 0 | 0 | 0 | 0 | 0 | 0 | 0 | 0 | 0 | 0 | 0 | 0 |
| 806 | 0 | 0 | 0 | 0 | 0 | 0 | 0 | 0 | 0 | 0 | 0.7 | 0 | 0 | 0 | 0 | 0 | 0 | 0 | 0 | 0 | 0 |
| 807 | 0 | 0 | 0 | 0 | 0 | 0.7 | 0 | 0 | 0 | 0 | 0 | 0 | 0 | 0 | 0 | 0 | 0 | 0 | 0 | 0 | 0 |
| 808 | 0 | 0.7 | 0 | 0 | 0 | 0 | 0 | 0 | 0 | 0 | 0 | 0 | 0 | 0 | 0 | 0 | 0 | 0 | 0 | 0 | 0 |

### Example 21: Scaled Up One-Pot Reaction of pA21841 and pA29798

[0107] E. coli microorganisms containing either the SuSy, pA21841, or the B12GT, pA29798, were expressed in 1 L and 10 L fermenters. The cells were collected and lysed by French press. The expressed protein was purified by immobilized metal affinity chromatography (IMAC) and dialyzed into desalt buffer (20 mM KPO4 pH6, 50 mM NaCl). A one-pot reaction to convert Reb A and stevioside to Reb D and Reb E, respectively, was carried out. pA21841 and pA29798 were reacted with 100 mg/ml RA50, 250 mM Sucrose, and 0.5 mM ADP in 50 mM KPO4 pH6 and 50 mM NaCl. In total, ten 20 mL 1pot reactions were conducted. The reactions were lyophilized and the combined reaction product was analyzed for rebaudioside content by liquid chromatography-mass spectrometry (LCMS) using an Agilent 6545 QTOF mass spectrometer (column: 150×2.1 mm Phenomenex C18-PS). Full conversion of Reb A to Reb D and stevioside to Reb E was observed (FIG. 7; Table 29).

TABLE 29
Rebaudioside Content of pA21841 and
pA29798 One-Pot Reaction Product

| | Retention | | % |
|---|---|---|---|
| Rebaudioside | Time (min) | Area | (SG Only) |
| Unknown (mass: 1127) | 4.6 | 28703 | 0.3 |
| Reb E | 5.2 | 3768926 | 37.5 |
| Reb D | 5.4 | 6011185 | 59.8 |
| Reb A | 8.1 | 164560 | 1.6 |
| Stevioside | 8.2 | 86265 | 0.9 |

### Example 22: Scaled Up One-Pot Reaction of pA21841 and pA29646

[0108] E. coli microorganisms containing either the SuSy, pA21841, or the B12GT, pA29646, were expressed in 10 L fermenters. The cells were collected and lysed by French press. The expressed protein was purified by immobilized metal affinity chromatography (IMAC) and dialyzed into desalt buffer (20 mM KPO4 pH6, 50 mM NaCl). A one-pot reaction to convert Reb A and stevioside to Reb D and Reb E, respectively, was carried out. pA21841 and pA29646 were reacted with 100 mg/ml RA50, 250 mM Sucrose, and 0.5 mM ADP in 50 mM KPO4 pH6 and 50 mM NaCl. In total, ten 20 mL 1pot reactions were conducted. The reactions were lyophilized and the combined reaction product was analyzed for rebaudioside content by liquid chromatography-mass spectrometry (LCMS) using an Agilent 6545 QTOF mass spectrometer (column: 150×2.1 mm phenomenex C18-PS). Full conversion of Reb A to Reb D and stevioside to Reb E was observed (FIG. 8; Table 30).

TABLE 30
Rebaudioside Content of pA21841 and
pA29646 One-Pot Reaction Product

| | Retention | | % |
|---|---|---|---|
| | Time (min) | Area | (SG Only) |
| Unknown (mass: 1127) | 5 | 2075 | 0 |
| Reb E | 5.4 | 954516 | 32 |
| Reb D | 5.6 | 1658236 | 65 |
| Reb A | 8.7 | 49223 | 2 |
| Stevioside | 8.8 | 22057 | 1 |

### Example 23: Pichia pastoris Expression of Designed B12GTs and SuSys

[0109] Polynucleotides optimized for Pichia pastoris expression of top designed B12GT (from Examples 12, 13 and 15) and SuSys (from Examples 17 and 19) were synthesized (Twist Bioscience) and inserted into a Pichia shuttle vector. The vectors were transformed into a commercially available Pichia pastoris strain (ATCC). The transformed microorganisms were grown in BMGY (buffered glycerol complex) media and protein expression was induced by feeding of methanol. The Pichia cells were lysed with Y-PER (Yeast Protein Extraction Reagent; Thermo Scientific) and the expressed proteins were purified by immobilized metal affinity chromatography (IMAC) and desalted into desalt buffer (20 mM KPO4 pH6, 50 mM NaCl). The designed B12GTs and SuSys solubly expressed and were catalytically active. FIG. 9 shows an SDS-PAGE gel of designed B12GTs purified from Pichia pastoris expression.

[0110] Two designed B12GTs and two designed SuSys were also expressed in 1 L fermentations. The Pichia microorganisms were grown with glycerol as the main carbon source for ˜24 hours, and then were fed methanol for ˜72 hours to express the desired B12GT or SUSY. The cells were collected and lysed by French press. The expressed protein was purified by immobilized metal affinity chromatography (IMAC) and dialyzed into desalt buffer (20 mM KPO4 pH6, 50 mM NaCl). FIG. 11A shows an SDS-PAGE gel of two designed B12GTs, pA29798 (left, B12GT-1) and pA32946 (right, B12GT-2), purified from 1 L Pichia pastoris fermentations. FIG. 10B shows SDS-PAGE gels of two designed SuSys, pA34103 (left, SuSy-1) and pA32691 (right, SuSy-2), purified from 1 L Pichia pastoris fermentations. All four enzymes successfully expressed in the fermentations and had the desired activity.

1-11. (canceled)

12. An engineered sucrose synthase polypeptide that comprises an amino acid sequence that is at least 60% identical to an amino acid sequence selected from the group consisting of SEQ ID NOs: 925-1180, wherein the amino acid sequence comprises H at position 425, R at position 567, K at position 572, and E at position 663, numbered according to SEQ ID NO: 885.

13-16. (canceled)

17. An engineered sucrose synthase polypeptide that has a score greater than 556 when scored by the position-specific scoring matrix (PSSM) shown in Table 24.

18. A polypeptide having the sequence of
MIEXLXXXLXXXXXXXXXXLRXXXXXXRXXXXXXDLXXXXXXFXXXXXX
XXXXXXXXXXXXXXXXQEAXXXXPWXXXAXRXRXXXWXYXRXHXEXLXV
EEXXXXEXLXXKEXLVXXXXEGXAVXXXDXXDXXXXXQXXKDESTIGXG
XXHLNRHLXGRXWXDXXXGXXXXXXXLXXHXXXXXXLXLXXXXXXFDXL
RXXXQYLGXXPXXXPXXXXXXXXXXXGFEPGXGXTXXRXRXTXRLLXDX
LDSPSPXXLEXFLXRXPXIXXXXIXSXHGXFXQXXVLGXPDTGGQVVXI
LDQXRALEXEXRXRLXXQGXDXEPXIXXXTRLIPXXXGTTCDQRLEPXX
GXXXXXILRXPFRXEXGXXXPXWISRFXXWPYLERXXXDXEXEXXAELG
XRPDXIIGNYSDGXLXAXXXXXKXGXTQXNXAHALEKXKYXXSDLXWXX
XEXXXHFXCQFTADXIAMNAADXIXTSTYQEIAGXDXXVGQYESXXXXT
XPGLYRXXXGXDVFDXXFNIXSPGADXXXYFXYXXXEXRXXXLXPEIEX
XXXXXXXXXXXRGVLXDXXKPXXXXXXRXDRIKNXXGXXEXXGXXXRLR
XLANLXXXXGHXDXXXSXDXEEXXXXXRXHXXXDXXXLDGQXRXXGXXL
XKXXVGEXYRXXADXRGXXXQPALXEAFGLTVIEXMXSGLPXXATXXGG
PXEIIEXGVSGFHIDPNXXXXXXEXXADXXEXXXXXPXYWEXISXXALX
RVXXRYTWXXXAERXXTXXRXXGFWXXVXXREXQVXXRYLQMXRHLQXR
PLAHAVPXE
wherein residue 4 is A or R or E or S or V
wherein residue 6 is R or D or E
wherein residue 7 is Q or E
wherein residue 8 is Q or F
wherein residue 10 is A or R or Q or H or L or K or S
wherein residue 11 is D or Q or E or S
wherein residue 12 is N or H or S
wherein residue 13 is R or P
wherein residue 14 is R or N or D or E
wherein residue 15 is A or D or Q or E or S or T
wherein residue 16 is L or W or V
wherein residue 17 is R or H or Y
wherein residue 18 is A or R or L
wherein residue 19 is L or F
wherein residue 22 is R or H
wherein residue 23 is L or Y
wherein residue 24 is L or V
wherein residue 25 is A or G
wherein residue 26 is Q or L or S
wherein residue 27 is Q or G
wherein residue 29 is D or G or P or T
wherein residue 30 is I or L or M or F or S
wherein residue 31 is L or W
wherein residue 32 is Q or L
wherein residue 33 is R or H
wherein residue 34 is H or S or T
wherein residue 37 is Q or W
wherein residue 38 is R or D or H
wherein residue 39 is A or E
wherein residue 40 is C or L or F
wherein residue 41 is A or D or E or L or K
wherein residue 42 is A or R or N or D or E or T
wherein residue 44 is R or C or Y
wherein residue 45 is A or E
wherein residue 46 is Q or E or P
wherein residue 47 is D or Q or E or P
wherein residue 48 is D or G or P
wherein residue 49 is N or E
wherein residue 50 is E or G
wherein residue 51 is E or S or Y
wherein residue 52 is A or E or G or L or P
wherein residue 53 is E or L
wherein residue 54 is A or D or C or G or L or K or M or T
wherein residue 55 is D or G or I or S or T
wherein residue 56 is G or S
wherein residue 57 is A or P or W or V
wherein residue 58 is L or F
wherein residue 59 is A or E or G
wherein residue 60 is R or D or Q or E
wherein residue 61 is A or L or F or V
wherein residue 62 is I or V
wherein residue 63 is A or R or Q or E or K
wherein residue 64 is A or R or H or K
wherein residue 65 is A or C or T
wherein residue 69 is A or I or V
wherein residue 70 is I or L or F or V
wherein residue 71 is R or D or E or H or L
wherein residue 72 is A or D
wherein residue 75 is A or I or L or M or F or V
wherein residue 76 is C or Y or V
wherein residue 77 is L or F
wherein residue 79 is I or L or W or V
wherein residue 81 is E or L or P
wherein residue 83 is P or V
wherein residue 84 is A or G
wherein residue 85 is R or V
wherein residue 87 is R or E or Y
wherein residue 89 is L or Y or V
wherein residue 91 is I or F
wherein residue 93 is I or L or V
wherein residue 95 is D or Q or T
wherein residue 97 is A or D or E or T or V
wherein residue 101 is I or L or V
wherein residue 102 is D or S or T
wherein residue 103 is T or V
wherein residue 104 is D or E or S
wherein residue 106 is F or Y
wherein residue 108 is A or Q
wherein residue 109 is A or F
wherein residue 112 is R or Q or E
wherein residue 115 is N or D or G or K or T
wherein residue 116 is G or L
wherein residue 117 is A or N or D or E or G
wherein residue 118 is A or Q or G or H or P or S
wherein residue 121 is N or D or E or P
wherein residue 124 is L or T or W
wherein residue 125 is E or K or T
wherein residue 126 is I or W or V
wherein residue 128 is L or F or W
wherein residue 129 is E or G
wherein residue 131 is L or F
wherein residue 132 is R or N
wherein residue 133 is R or P
wherein residue 134 is N or E or G or H or S or Tor V
wherein residue 135 is F or S or V
wherein residue 137 is R or K
wherein residue 138 is L or M
wherein residue 146 is R or N or D
wherein residue 148 is L or V
wherein residue 149 is Q or E or T
wherein residue 156 is A or S
wherein residue 159 is I or L or M
wherein residue 161 is Q or G or T
wherein residue 163 is L or T
wherein residue 164 is A or G or K
wherein residue 165 is A or R or D or Q or E or G or K
wherein residue 167 is R or D or L or M
wherein residue 168 is D or Q or E or S or Y
wherein residue 169 is A or R or Q or K
wherein residue 170 is I or L
wherein residue 171 is I or L
wherein residue 172 is D or E
wherein residue 173 is F or W
wherein residue 175 is R or G or S
wherein residue 176 is L or V
wherein residue 178 is R or Q
wherein residue 179 is H or I or L or Y
wherein residue 180 is R or D
wherein residue 181 is N or G
wherein residue 182 is R or Q
wherein residue 183 is N or Q or H
wherein residue 185 is G or M
wherein residue 187 is N or S
wherein residue 188 is N or D or E
wherein residue 189 is R or G
wherein residue 190 is N or I or M or F
wherein residue 191 is R or Q or K or T
wherein residue 192 is D or S
wherein residue 195 is A or E or G or S
wherein residue 198 is R or Q
wherein residue 199 is A or T or V
wherein residue 200 is E or I or L or M or V
wherein residue 205 is R or G or K or T
wherein residue 206 is Q or L
wherein residue 208 is A or R or D or E or P
wherein residue 209 is D or E
wherein residue 210 is A or T
wherein residue 212 is L or W
wherein residue 213 is A or E or S
wherein residue 214 is D or E
wherein residue 215 is L or F or V
wherein residue 216 is A or R or Q or E or G
wherein residue 217 is E or H or P
wherein residue 218 is A or R or D or E or K or T
wherein residue 219 is L or M
wherein residue 220 is R or Q
wherein residue 221 is R or E
wherein residue 222 is R or L or M or W
wherein residue 228 is L or W
wherein residue 230 is R or N or D
wherein residue 232 is A or V
wherein residue 233 is A or Q or E or G
wherein residue 235 is I or M or V
wherein residue 237 is D or E
wherein residue 239 is L or M
wherein residue 243 is M or V
wherein residue 245 is I or L
wherein residue 252 is A or R or E or G or S
wherein residue 253 is A or N or T
wherein residue 256 is R or E or K or S or T
wherein residue 259 is A or D or G
wherein residue 261 is I or V
wherein residue 263 is L or M
wherein residue 265 is F or S
wherein residue 266 is N or S
wherein residue 267 is I or L or V
wherein residue 268 is A or I or L or T or V
wherein residue 270 is I or L or V
wherein residue 272 is I or P or V
wherein residue 275 is W or Y
wherein residue 277 is A or G
wherein residue 279 is A or D or S
wherein residue 280 is N or K
wherein residue 284 is R or L or Y
wherein residue 293 is F or W or Y
wherein residue 298 is A or V
wherein residue 303 is R or K
wherein residue 305 is I or L or M
wherein residue 307 is R or N or D or Q or E or K
wherein residue 310 is A or R or H or Y
wherein residue 311 is Q or E
wherein residue 314 is L or V
wherein residue 316 is I or V
wherein residue 319 is R or Q
wherein residue 321 is I or L
wherein residue 322 is I or V
wherein residue 323 is A or I or L or V
wherein residue 329 is D or E
wherein residue 330 is A or S
wherein residue 331 is R or D or E or G or K
wherein residue 342 is I or V
wherein residue 343 is H or S or V
wherein residue 345 is A or T
wherein residue 346 is R or E
wherein residue 347 is N or H or Y
wherein residue 348 is A or V
wherein residue 349 is R or Q or H or W
wherein residue 353 is I or V
wherein residue 357 is N or Y
wherein residue 359 is D or S
wherein residue 361 is R or N or E or T
wherein residue 362 is I or V
wherein residue 363 is H or I or L or V
wherein residue 365 is Q or H
wherein residue 371 is R or E or K
wherein residue 372 is I or V
wherein residue 379 is F or W or Y
wherein residue 380 is A or V
wherein residue 381 is R or Q or E or L or S
wherein residue 383 is A or L or V
wherein residue 385 is R or K
wherein residue 387 is I or L or V
wherein residue 388 is L or K
wherein residue 393 is G or S
wherein residue 397 is A or L or V
wherein residue 406 is N or G
wherein residue 408 is I or V
wherein residue 410 is S or T
wherein residue 411 is I or L
wherein residue 412 is I or L or M
wherein residue 413 is A or S
wherein residue 414 is Q or E
wherein residue 416 is L or W
wherein residue 418 is I or V
wherein residue 421 is C or I or M or T or V
wherein residue 423 is I or F
wherein residue 430 is S or T
wherein residue 433 is L or P
wherein residue 434 is D or G or Y
wherein residue 438 is H or Y
wherein residue 440 is R or K or P
wherein residue 441 is R or D or L or K
wherein residue 442 is N or H or F or Y
wherein residue 444 is A or D or Q or E or P
wherein residue 445 is D or Q or K
wherein residue 446 is H or Y
wherein residue 449 is A or S
wherein residue 456 is L or W
wherein residue 464 is A or I or F or V
wherein residue 466 is I or V
wherein residue 476 is N or T
wherein residue 478 is R or N or D or H
wherein residue 479 is E or S
wherein residue 486 is H or Y
wherein residue 487 is A or Q or G or S or T
wherein residue 488 is A or D or H or S
wherein residue 489 is F or Y
wherein residue 491 is L or M
wherein residue 497 is I or V
wherein residue 498 is E or I or V
wherein residue 499 is N or H
wherein residue 501 is I or V
wherein residue 506 is P or S
wherein residue 507 is R or K
wherein residue 511 is I or V
wherein residue 517 is A or P
wherein residue 518 is R or D or E or S
wherein residue 519 is I or T or V
wherein residue 522 is P or S
wherein residue 524 is A or S or T
wherein residue 525 is R or D or E
wherein residue 526 is H or K or T
wherein residue 528 is R or E or K
wherein residue 530 is L or F
wherein residue 531 is S or T
wherein residue 532 is G or S
wherein residue 534 is H or W
wherein residue 539 is R or E or K or S
wherein residue 540 is I or L or M
wherein residue 541 is I or L or W or V
wherein residue 542 is F or Y
wherein residue 543 is G or S
wherein residue 544 is R or D or G or P
wherein residue 545 is D or E or P
wherein residue 546 is D or Q or E or P or T
wherein residue 547 is R or G
wherein residue 548 is A or G or P
wherein residue 549 is D or E or P
wherein residue 550 is A or H or I
wherein residue 555 is A or E or K or S
wherein residue 557 is R or P
wherein residue 558 is D or Q or S
wherein residue 561 is I or L or V
wherein residue 562 is I or L
wherein residue 563 is L or F
wherein residue 564 is S or T
wherein residue 565 is I or M or V
wherein residue 566 is A or M or S
wherein residue 568 is L or M
wherein residue 574 is Q or I or L or M
wherein residue 575 is S or T
wherein residue 577 is L or W
wherein residue 578 is A or L or M or V
wherein residue 580 is I or L or W
wherein residue 581 is F or Y or V
wherein residue 583 is A or R
wherein residue 584 is N or S
wherein residue 585 is A or N or E or P or S
wherein residue 589 is E or S
wherein residue 594 is I or L or V
wherein residue 595 is I or L or V
wherein residue 596 is I or V
wherein residue 597 is A or G
wherein residue 600 is I or V
wherein residue 602 is A or P or V
wherein residue 603 is A or N or Q or E or G or S
wherein residue 604 is A or R or N or Q or E or K
wherein residue 606 is A or R or N or D or G or M or S or T
wherein residue 608 is A or R or E or G or H or S
wherein residue 611 is R or Q
wherein residue 612 is A or E
wherein residue 613 is Q or E
wherein residue 614 is I or M or V
wherein residue 615 is A or R or Q or E or G or K
wherein residue 617 is I or L or M
wherein residue 619 is Q or E
wherein residue 620 is I or L
wherein residue 621 is I or L or M
wherein residue 623 is R or E or H or K
wherein residue 624 is H or Y
wherein residue 625 is N or Q or G
wherein residue 630 is A or M or F or V
wherein residue 632 is L or W
wherein residue 633 is I or L or V
wherein residue 635 is A or L or S or V
wherein residue 636 is Q or H
wherein residue 638 is N or D or E
wherein residue 640 is R or N or T or V
wherein residue 641 is R or L or W or V
wherein residue 645 is I or L
wherein residue 648 is W or Y or V
wherein residue 649 is I or L or V
wherein residue 652 is R or Q or G or H or K or T
wherein residue 655 is A or I or V
wherein residue 656 is F or W or V
wherein residue 657 is I or V
wherein residue 662 is F or Y
wherein residue 672 is A or V
wherein residue 674 is A or S or T
wherein residue 679 is T or V
wherein residue 680 is F or W
wherein residue 683 is R or C
wherein residue 684 is H or Y
wherein residue 688 is A or L
wherein residue 693 is D or H
wherein residue 704 is D or Q or H
wherein residue 705 is G or P
wherein residue 706 is D or E
wherein residue 707 is A or Q or E
wherein residue 708 is A or T or V
wherein residue 709 is A or L
wherein residue 711 is R or I or L or K
wherein residue 712 is I or L or M
wherein residue 715 is F or W
wherein residue 716 is L or F
wherein residue 718 is A or R or H or K
wherein residue 719 is A or C
wherein residue 720 is A or R or K
wherein residue 721 is A or N or E
wherein residue 722 is R or N or D or E
wherein residue 724 is D or G or K or S or T
wherein residue 728 is R or E or K
wherein residue 731 is R or D or Q
wherein residue 732 is A or G
wherein residue 735 is A or Q or E or K
wherein residue 738 is R or E or S or Y
wherein residue 739 is A or E or S
wherein residue 744 is E or K
wherein residue 745 is R or L
wherein residue 746 is W or Y
wherein residue 750 is L or M or W
wherein residue 751 is A or L or M
wherein residue 753 is I or L
wherein residue 754 is A or I or L or M or S or V
wherein residue 756 is A or C or I or V
wherein residue 757 is A or I or M or F or W or Y
wherein residue 761 is R or K
wherein residue 762 is F or Y
wherein residue 764 is L or S or T
wherein residue 765 is N or K or S
wherein residue 768 is R or H or S
wherein residue 771 is M or T
wherein residue 772 is R or E
wherein residue 778 is I or F
wherein residue 783 is F or W or Y
wherein residue 792 is L or M (SEQ ID NO: 1229)

19. (canceled)

20. (canceled)

21. (canceled)

22. A method for transferring a sugar moiety to a substrate steviol glycoside, the method comprising contacting a β-1,2-glycosyltransferase (B12GT) and a sucrose synthase with one or more steviol glycosides, a non-UDP nucleotide diphosphate, and sucrose.

23. The method of claim 22, wherein the B12GT polypeptide is an engineered B12GT that comprises an amino acid sequence that is at least 60% identical to an amino acid sequence selected from the group consisting of SEQ ID NOs: 1-882 and 1333-1466.

24. The method of claim 22, wherein the sucrose synthase polypeptide is an engineered sucrose synthase that comprises an amino acid sequence that is at least 60% identical to an amino acid sequence selected from the group consisting of SEQ ID NOs: 925-1180, wherein the amino acid sequence comprises H at position 425, R at position 567, K at position 572, and E at position 663, numbered according to SEQ ID NO: 885.

25. (canceled)

26. The method of claim 22, wherein the B12GT polypeptide is an engineered B12GT polypeptide that has a score greater than 266.7 when scored by the position-specific scoring matrix (PSSM) shown in Table 17.

27. The method of claim 22, wherein the sucrose synthase is an engineered sucrose synthase polypeptide that has a score greater than 556 when scored by the position-specific scoring matrix (PSSM) shown in Table 24.

28. (canceled)

29. (canceled)

30. (canceled)

31. The method of claim 22, wherein the substrate steviol glycoside is steviol, steviol-13-O-glucoside, steviol-19-O-glucoside, rubusoside, steviol-1,2-bioside, steviol-1,3-bioside, rubusoside, dulcoside B, dulcoside A, rebaudioside B, rebaudioside G, stevioside, rebaudioside C, rebaudioside F, rebaudioside A, rebaudioside I, rebaudioside E, rebaudioside H, rebaudioside L, rebaudioside K, rebaudioside J, rebaudioside M, rebaudioside D, rebaudioside N, rebaudioside O, rebaudioside Q, an isomer thereof, a synthetic steviol glycoside or combinations thereof.

32. The method of claim 22, wherein the substrate steviol glycoside is a mixture of stevioside and rebaudioside A.

33. The method of claim 22, wherein the target steviol glycoside is steviol, steviol-13-O-glucoside, steviol-19-O-glucoside, rubusoside, steviol-1,2-bioside, steviol-1,3-bioside, rubusoside, dulcoside B, dulcoside A, rebaudioside B, rebaudioside G, stevioside, rebaudioside C, rebaudioside F, rebaudioside A, rebaudioside I, rebaudioside E, rebaudioside H, rebaudioside L, rebaudioside K, rebaudioside J, rebaudioside M, rebaudioside D, rebaudioside N, rebaudioside O, rebaudioside Q, an isomer thereof, a synthetic steviol glycoside or combinations thereof.

34. The method of claim 22, wherein the target steviol glycoside is a mixture of rebaudioside E and rebaudioside D.

35. The method of claim 22, wherein the target steviol glycoside is rebaudioside D.

36. The method of claim 22, wherein the target steviol glycoside is rebaudioside E.

37. The method of claim 22, wherein the non-UDP nucleotide diphosphate is ADP, GDP, CDP, or TDP.

38. The method of claim 22, wherein the non-UDP nucleotide diphosphate is ADP.

39. A polynucleotide encoding a polypeptide of claim 12.

40. A host microorganism heterologously expressing the polynucleotide of claim 39.

41. The engineered sucrose synthase polypeptide of claim 12, wherein the amino acid sequence selected from the group is SEQ ID NO: 1132.

42. The method of claim 24, wherein the amino acid sequence selected from the group is SEQ ID NO: 1132.

The application's sequence listing, which the Patent Office published only in electronic form, follows.

SEQUENCE LISTING (1466 sequences)

SEQ ID NO: 1 - protein, 462 aa, Oryza sativa
MDSGYSSSYAAAAGMHVVICPWLAFGHLLPCLDLAQRLASRGHRVSFVSTPRNISRLPPVRPALAPLVAFVALPLPRVEGLPDGAESTNDVPHDRPDMVELHRRAFDGLAAPFSEFLGTACADWVIVDVFHHWAAAAALEHKVPCAMMLLGSAHMIASIADRRLERAETESPAAAGQGRPAAAPTFEVARMKLIRTKGSSGMSLAERFSLTLSRSSLVVGRSCVEFEPETVPLLSTLRGKPITFLGLMPPLHEGRREDGEDATVRWLDAQPAKSVVYVALGSEVPLGVEKVHELALGLELAGTRFLWALRKPTGVSDADLLPAGFEERTRGRGVVATRWVPQMSILAHAAVGAFLTHCGWNSTIEGLMFGHPLIMLPIFGDQGPNARLIEAKNAGLQVARNDGDGSFDREGVAAAIRAVAVEEESSKVFQAKAKKLQEIVADMACHERYIDGFIQQLRSYKD

SEQ ID NO: 2 - protein, 442 aa, Solanum lycopersicum
MATNLRVLMFPWLAYGHISPFLNIAKQLADRGFLIYLCSTRINLESIIKKIPEKYADSIHLIELQLPELPELPPHYHTTNGLPPHLNPTLHKALKMSKPNFSRILQNLKPDLLIYDVLQPWAEHVANEQNIPAGKLLTSCAAVFSYFFSFRKNPGVEFPFPAIHLPEVEKVKIREILAKEPEEGGRLDEGNKQMMLMCTSRTIEAKYIDYCTELCNWKVVPVGPPFQDLITNDADNKELIDWLGTKHENSTVFVSFGSEYFLSKEDMEEVAFALELSNVNFIWVARFPKGEERNLEDALPKGFLERIGERGRVLDKFAPQPRILNHPSTGGFISHCGWNSAMESIDFGVPIIAMPIHNDQPINAKLMVELGVAVEIVRDDDGKIHRGEIAETLKSVVTGETGEILRAKVREISKNLKSIRDEEMDAVAEELIQLCRNSNKSK

SEQ ID NO: 3 - protein, 454 aa, Lycium barbarum
MGTEVTVHKNTLRVLMFPWLAYGHISPFLNVAKKLVDRGFLIYLCSTAINLKSTIKKIPEKYSDSIQLIELHLPELPELPPHYHTTNGLPPHLNHTLQKALKMSKPNFSKILQNLKPDLVIYDLLQQWAEGVANEQNIPAVKLLTSGAAVLSYFFNLVKKPGVEFPFPAIYLRKNELEKMSELLAQSAKDKEPDGVDPFADGNMQVMLMSTSRIIEAKYIDYFSGLSNWKVVPVGPPVQDPIADDADEMELIDWLGKKDENSTVFVSFGSEYFLSKEDREEIAFGLELSNVNFIWVARFPKGEEQNLEDALPKGFLERIGDRGRVLDKFAPQPRILNHPSTGGFISHCGWNSVMESVDFGVPIIAMPIHLDQPMNARLIVELGVAVEIVRDDYGKIHREEIAEILKDVIAGKSGENLKAKMRDISKNLKSIRDEEMDTAAEELIQLCKNSPKLK

SEQ ID NO: 4 - protein, 470 aa, Solanum lycopersicum
MSPKLHKELFFHSLYKKTRSNHTMATLKVLMFPFLAYGHISPYLNVAKKLADRGFLIYFCSTPINLKSTIEKIPEKYADSIHLIELHLPELPQLPPHYHTTNGLPPNLNQVLQKALKMSKPNFSKILQNLKPDLVIYDILQRWAKHVANEQNIPAVKLLTSGAAVFSYFFNVLKKPGVEFPFPGIYLRKIEQVRLSEMMSKSDKEKELEDDDDDDDLLVDGNMQIMLMSTSRTIEAKYIDFCTALTNWKVVPVGPPVQDLITNDVDDMELIDWLGTKDENSTVFVSFGSEYFLSKEDMEEVAFALELSNVNFIWVARFPKGEERNLEDALPKGFLERIGERGRVLDKFAPQPRILNHPSTGGFISHCGWNSAMESIDFGVPIIAMPMHLDQPMNARLIVELGVAVEIVRDDDGKIHRGEIAETLKGVITGKTGEKLRAKVRDISKNLKTIRDEEMDAAAEELIQLCRNGN

SEQ ID NO: 5 - protein, 440 aa, Solanum tuberosum
ATLRVLMFPWLAYGHISPFLNIAKQLADRGFLIYLCSTLINLESIIKKIPEKYSESIRFVELHLPELPELPPHYHTTNGLPPHLNHTLHKALKMSKPNFSKILQNLKPDLVIYDILQPWAEHVVNEQNIPAVKILTSGAALFSYFFNFLKNPGVEFPFPAIYLPKVEQVKMREMFEKEPNEEDRLAEGNMQIMLMCTSRTIEAKYLDYCTELSNWKVVPVGPPFQDPITNDVDDMELIDWLGTKDENSTVFVCFGSEYFLSREDMEEVAFGLELSNVNFIWVARFPKGEEQNLEDVLPKGFLERIGERGRVLDKFAPQPRILNHPSTGGFISHCGWNSVMESLDFGVPIIAMPMHNDQPINAKLIVELGVAMEIVRDDDGNIHRGEITETLKDVITGETGEILRGKVRDISKNLKSIREEEMNAAAEELIQLCRNSNKYK

SEQ ID NO: 6 - protein, 442 aa, Artificial Sequence
  engineered beta-1,2-glycosyltransferase encoded in plasmid pA30328
MATNLRVLMFPWLAYGHISPFLNIAKQLADRGFLIYLCSTRINLESIIKKIPEKYADSIHLIELQLPELPELPPHYHTTNALPPHLNPTLHKALKMSKPNFSRILQNLKPDLLIYDVLQPWAEHVANEQNIPAGKLLTSCAAVFSYFFSFRKNPGVEFPFPAIHLPEVEKVKIREILAKEPEEGGRLDEGNKQMMLMCTSRTIEAKYIDYCTELCNWKVVPVGPPFQDLITNDADNKELIDWLGTKHENSTVFVSFGSEYFLSKEDMEEVAFALELSNVNFIWVARFPKGEERNLEDALPKGFLERIGERGRVLDKFAPQPRILNHPSTGGFISHCGWNSAMESIDFGVPIIAMPIHNDQPINAKLMVELGVAVEIVRDDDGKIHRGEIAETLKSVVTGETGEILRAKVREISKNLKSIRDEEMDAVAEELIQLCRNSNKSK

SEQ ID NO: 7 - protein, 442 aa, Artificial Sequence
  engineered beta-1,2-glycosyltransferase encoded in plasmid pA30329
MATNLRVLMFPWLAYGHISPFLNIAKQLADRGFLIYLCSTRINLESIIKKIPEKYADSIHLIELQLPELPELPPHYHTTNVLPPHLNPTLHKALKMSKPNFSRILQNLKPDLLIYDVLQPWAEHVANEQNIPAGKLLTSCAAVFSYFFSFRKNPGVEFPFPAIHLPEVEKVKIREILAKEPEEGGRLDEGNKQMMLMCTSRTIEAKYIDYCTELCNWKVVPVGPPFQDLITNDADNKELIDWLGTKHENSTVFVSFGSEYFLSKEDMEEVAFALELSNVNFIWVARFPKGEERNLEDALPKGFLERIGERGRVLDKFAPQPRILNHPSTGGFISHCGWNSAMESIDFGVPIIAMPIHNDQPINAKLMVELGVAVEIVRDDDGKIHRGEIAETLKSVVTGETGEILRAKVREISKNLKSIRDEEMDAVAEELIQLCRNSNKSK

SEQ ID NO: 8 - protein, 442 aa, Artificial Sequence
  engineered beta-1,2-glycosyltransferase encoded in plasmid pA30331
MATNLRVLMFPWLAYGHISPFLNIAKQLADRGFLIYLCSTRINLESIIKKIPEKYADSIHLIELQLPELPELPPHYHTTNILPPHLNPTLHKALKMSKPNFSRILQNLKPDLLIYDVLQPWAEHVANEQNIPAGKLLTSCAAVFSYFFSFRKNPGVEFPFPAIHLPEVEKVKIREILAKEPEEGGRLDEGNKQMMLMCTSRTIEAKYIDYCTELCNWKVVPVGPPFQDLITNDADNKELIDWLGTKHENSTVFVSFGSEYFLSKEDMEEVAFALELSNVNFIWVARFPKGEERNLEDALPKGFLERIGERGRVLDKFAPQPRILNHPSTGGFISHCGWNSAMESIDFGVPIIAMPIHNDQPINAKLMVELGVAVEIVRDDDGKIHRGEIAETLKSVVTGETGEILRAKVREISKNLKSIRDEEMDAVAEELIQLCRNSNKSK

SEQ ID NO: 9 - protein, 442 aa, Artificial Sequence
  engineered beta-1,2-glycosyltransferase encoded in plasmid pA30332
MATNLRVLMFPWLAYGHISPFLNIAKQLADRGFLIYLCSTRINLESIIKKIPEKYADSIHLIELQLPELPELPPHYHTTNMLPPHLNPTLHKALKMSKPNFSRILQNLKPDLLIYDVLQPWAEHVANEQNIPAGKLLTSCAAVFSYFFSFRKNPGVEFPFPAIHLPEVEKVKIREILAKEPEEGGRLDEGNKQMMLMCTSRTIEAKYIDYCTELCNWKVVPVGPPFQDLITNDADNKELIDWLGTKHENSTVFVSFGSEYFLSKEDMEEVAFALELSNVNFIWVARFPKGEERNLEDALPKGFLERIGERGRVLDKFAPQPRILNHPSTGGFISHCGWNSAMESIDFGVPIIAMPIHNDQPINAKLMVELGVAVEIVRDDDGKIHRGEIAETLKSVVTGETGEILRAKVREISKNLKSIRDEEMDAVAEELIQLCRNSNKSK

SEQ ID NO: 10 - protein, 442 aa, Artificial Sequence
  engineered beta-1,2-glycosyltransferase encoded in plasmid pA30333
MATNLRVLMFPWLAYGHISPFLNIAKQLADRGFLIYLCSTRINLESIIKKIPEKYADSIHLIELQLPELPELPPHYHTTNCLPPHLNPTLHKALKMSKPNFSRILQNLKPDLLIYDVLQPWAEHVANEQNIPAGKLLTSCAAVFSYFFSFRKNPGVEFPFPAIHLPEVEKVKIREILAKEPEEGGRLDEGNKQMMLMCTSRTIEAKYIDYCTELCNWKVVPVGPPFQDLITNDADNKELIDWLGTKHENSTVFVSFGSEYFLSKEDMEEVAFALELSNVNFIWVARFPKGEERNLEDALPKGFLERIGERGRVLDKFAPQPRILNHPSTGGFISHCGWNSAMESIDFGVPIIAMPIHNDQPINAKLMVELGVAVEIVRDDDGKIHRGEIAETLKSVVTGETGEILRAKVREISKNLKSIRDEEMDAVAEELIQLCRNSNKSK

SEQ ID NO: 11 - protein, 442 aa, Artificial Sequence
  engineered beta-1,2-glycosyltransferase encoded in plasmid pA30334
MATNLRVLMFPWLAYGHISPFLNIAKQLADRGFLIYLCSTRINLESIIKKIPEKYADSIHLIELQLPELPELPPHYHTTNFLPPHLNPTLHKALKMSKPNFSRILQNLKPDLLIYDVLQPWAEHVANEQNIPAGKLLTSCAAVFSYFFSFRKNPGVEFPFPAIHLPEVEKVKIREILAKEPEEGGRLDEGNKQMMLMCTSRTIEAKYIDYCTELCNWKVVPVGPPFQDLITNDADNKELIDWLGTKHENSTVFVSFGSEYFLSKEDMEEVAFALELSNVNFIWVARFPKGEERNLEDALPKGFLERIGERGRVLDKFAPQPRILNHPSTGGFISHCGWNSAMESIDFGVPIIAMPIHNDQPINAKLMVELGVAVEIVRDDDGKIHRGEIAETLKSVVTGETGEILRAKVREISKNLKSIRDEEMDAVAEELIQLCRNSNKSK

SEQ ID NO: 12 - protein, 442 aa, Artificial Sequence
  engineered beta-1,2-glycosyltransferase encoded in plasmid pA30335
MATNLRVLMFPWLAYGHISPFLNIAKQLADRGFLIYLCSTRINLESIIKKIPEKYADSIHLIELQLPELPELPPHYHTTNYLPPHLNPTLHKALKMSKPNFSRILQNLKPDLLIYDVLQPWAEHVANEQNIPAGKLLTSCAAVFSYFFSFRKNPGVEFPFPAIHLPEVEKVKIREILAKEPEEGGRLDEGNKQMMLMCTSRTIEAKYIDYCTELCNWKVVPVGPPFQDLITNDADNKELIDWLGTKHENSTVFVSFGSEYFLSKEDMEEVAFALELSNVNFIWVARFPKGEERNLEDALPKGFLERIGERGRVLDKFAPQPRILNHPSTGGFISHCGWNSAMESIDFGVPIIAMPIHNDQPINAKLMVELGVAVEIVRDDDGKIHRGEIAETLKSVVTGETGEILRAKVREISKNLKSIRDEEMDAVAEELIQLCRNSNKSK

SEQ ID NO: 13 - protein, 442 aa, Artificial Sequence
  engineered beta-1,2-glycosyltransferase encoded in plasmid pA30337
MATNLRVLMFPWLAYGHISPFLNIAKQLADRGFLIYLCSTRINLESIIKKIPEKYADSIHLIELQLPELPELPPHYHTTNHLPPHLNPTLHKALKMSKPNFSRILQNLKPDLLIYDVLQPWAEHVANEQNIPAGKLLTSCAAVFSYFFSFRKNPGVEFPFPAIHLPEVEKVKIREILAKEPEEGGRLDEGNKQMMLMCTSRTIEAKYIDYCTELCNWKVVPVGPPFQDLITNDADNKELIDWLGTKHENSTVFVSFGSEYFLSKEDMEEVAFALELSNVNFIWVARFPKGEERNLEDALPKGFLERIGERGRVLDKFAPQPRILNHPSTGGFISHCGWNSAMESIDFGVPIIAMPIHNDQPINAKLMVELGVAVEIVRDDDGKIHRGEIAETLKSVVTGETGEILRAKVREISKNLKSIRDEEMDAVAEELIQLCRNSNKSK

SEQ ID NO: 14 - protein, 442 aa, Artificial Sequence
  engineered beta-1,2-glycosyltransferase encoded in plasmid pA30338
MATNLRVLMFPWLAYGHISPFLNIAKQLADRGFLIYLCSTRINLESIIKKIPEKYADSIHLIELQLPELPELPPHYHTTNKLPPHLNPTLHKALKMSKPNFSRILQNLKPDLLIYDVLQPWAEHVANEQNIPAGKLLTSCAAVFSYFFSFRKNPGVEFPFPAIHLPEVEKVKIREILAKEPEEGGRLDEGNKQMMLMCTSRTIEAKYIDYCTELCNWKVVPVGPPFQDLITNDADNKELIDWLGTKHENSTVFVSFGSEYFLSKEDMEEVAFALELSNVNFIWVARFPKGEERNLEDALPKGFLERIGERGRVLDKFAPQPRILNHPSTGGFISHCGWNSAMESIDFGVPIIAMPIHNDQPINAKLMVELGVAVEIVRDDDGKIHRGEIAETLKSVVTGETGEILRAKVREISKNLKSIRDEEMDAVAEELIQLCRNSNKSK

SEQ ID NO: 15 - protein, 442 aa, Artificial Sequence
  engineered beta-1,2-glycosyltransferase encoded in plasmid pA30339
MATNLRVLMFPWLAYGHISPFLNIAKQLADRGFLIYLCSTRINLESIIKKIPEKYADSIHLIELQLPELPELPPHYHTTNRLPPHLNPTLHKALKMSKPNFSRILQNLKPDLLIYDVLQPWAEHVANEQNIPAGKLLTSCAAVFSYFFSFRKNPGVEFPFPAIHLPEVEKVKIREILAKEPEEGGRLDEGNKQMMLMCTSRTIEAKYIDYCTELCNWKVVPVGPPFQDLITNDADNKELIDWLGTKHENSTVFVSFGSEYFLSKEDMEEVAFALELSNVNFIWVARFPKGEERNLEDALPKGFLERIGERGRVLDKFAPQPRILNHPSTGGFISHCGWNSAMESIDFGVPIIAMPIHNDQPINAKLMVELGVAVEIVRDDDGKIHRGEIAETLKSVVTGETGEILRAKVREISKNLKSIRDEEMDAVAEELIQLCRNSNKSK

SEQ ID NO: 16 - protein, 442 aa, Artificial Sequence
  engineered beta-1,2-glycosyltransferase encoded in plasmid pA30340
MATNLRVLMFPWLAYGHISPFLNIAKQLADRGFLIYLCSTRINLESIIKKIPEKYADSIHLIELQLPELPELPPHYHTTNQLPPHLNPTLHKALKMSKPNFSRILQNLKPDLLIYDVLQPWAEHVANEQNIPAGKLLTSCAAVFSYFFSFRKNPGVEFPFPAIHLPEVEKVKIREILAKEPEEGGRLDEGNKQMMLMCTSRTIEAKYIDYCTELCNWKVVPVGPPFQDLITNDADNKELIDWLGTKHENSTVFVSFGSEYFLSKEDMEEVAFALELSNVNFIWVARFPKGEERNLEDALPKGFLERIGERGRVLDKFAPQPRILNHPSTGGFISHCGWNSAMESIDFGVPIIAMPIHNDQPINAKLMVELGVAVEIVRDDDGKIHRGEIAETLKSVVTGETGEILRAKVREISKNLKSIRDEEMDAVAEELIQLCRNSNKSK

SEQ ID NO: 17 - protein, 442 aa, Artificial Sequence
  engineered beta-1,2-glycosyltransferase encoded in plasmid pA30341
MATNLRVLMFPWLAYGHISPFLNIAKQLADRGFLIYLCSTRINLESIIKKIPEKYADSIHLIELQLPELPELPPHYHTTNNLPPHLNPTLHKALKMSKPNFSRILQNLKPDLLIYDVLQPWAEHVANEQNIPAGKLLTSCAAVFSYFFSFRKNPGVEFPFPAIHLPEVEKVKIREILAKEPEEGGRLDEGNKQMMLMCTSRTIEAKYIDYCTELCNWKVVPVGPPFQDLITNDADNKELIDWLGTKHENSTVFVSFGSEYFLSKEDMEEVAFALELSNVNFIWVARFPKGEERNLEDALPKGFLERIGERGRVLDKFAPQPRILNHPSTGGFISHCGWNSAMESIDFGVPIIAMPIHNDQPINAKLMVELGVAVEIVRDDDGKIHRGEIAETLKSVVTGETGEILRAKVREISKNLKSIRDEEMDAVAEELIQLCRNSNKSK

SEQ ID NO: 18 - protein, 442 aa, Artificial Sequence
  engineered beta-1,2-glycosyltransferase encoded in plasmid pA30342
MATNLRVLMFPWLAYGHISPFLNIAKQLADRGFLIYLCSTRINLESIIKKIPEKYADSIHLIELQLPELPELPPHYHTTNELPPHLNPTLHKALKMSKPNFSRILQNLKPDLLIYDVLQPWAEHVANEQNIPAGKLLTSCAAVFSYFFSFRKNPGVEFPFPAIHLPEVEKVKIREILAKEPEEGGRLDEGNKQMMLMCTSRTIEAKYIDYCTELCNWKVVPVGPPFQDLITNDADNKELIDWLGTKHENSTVFVSFGSEYFLSKEDMEEVAFALELSNVNFIWVARFPKGEERNLEDALPKGFLERIGERGRVLDKFAPQPRILNHPSTGGFISHCGWNSAMESIDFGVPIIAMPIHNDQPINAKLMVELGVAVEIVRDDDGKIHRGEIAETLKSVVTGETGEILRAKVREISKNLKSIRDEEMDAVAEELIQLCRNSNKSK

SEQ ID NO: 19 - protein, 442 aa, Artificial Sequence
  engineered beta-1,2-glycosyltransferase encoded in plasmid pA30343
MATNLRVLMFPWLAYGHISPFLNIAKQLADRGFLIYLCSTRINLESIIKKIPEKYADSIHLIELQLPELPELPPHYHTTNDLPPHLNPTLHKALKMSKPNFSRILQNLKPDLLIYDVLQPWAEHVANEQNIPAGKLLTSCAAVFSYFFSFRKNPGVEFPFPAIHLPEVEKVKIREILAKEPEEGGRLDEGNKQMMLMCTSRTIEAKYIDYCTELCNWKVVPVGPPFQDLITNDADNKELIDWLGTKHENSTVFVSFGSEYFLSKEDMEEVAFALELSNVNFIWVARFPKGEERNLEDALPKGFLERIGERGRVLDKFAPQPRILNHPSTGGFISHCGWNSAMESIDFGVPIIAMPIHNDQPINAKLMVELGVAVEIVRDDDGKIHRGEIAETLKSVVTGETGEILRAKVREISKNLKSIRDEEMDAVAEELIQLCRNSNKSK

SEQ ID NO: 20 - protein, 442 aa, Artificial Sequence
  engineered beta-1,2-glycosyltransferase encoded in plasmid pA30345
MATNLRVLMFPWLAYGHISPFLNIAKQLADRGFLIYLCSTRINLESIIKKIPEKYADSIHLIELQLPELPELPPHYHTTNTLPPHLNPTLHKALKMSKPNFSRILQNLKPDLLIYDVLQPWAEHVANEQNIPAGKLLTSCAAVFSYFFSFRKNPGVEFPFPAIHLPEVEKVKIREILAKEPEEGGRLDEGNKQMMLMCTSRTIEAKYIDYCTELCNWKVVPVGPPFQDLITNDADNKELIDWLGTKHENSTVFVSFGSEYFLSKEDMEEVAFALELSNVNFIWVARFPKGEERNLEDALPKGFLERIGERGRVLDKFAPQPRILNHPSTGGFISHCGWNSAMESIDFGVPIIAMPIHNDQPINAKLMVELGVAVEIVRDDDGKIHRGEIAETLKSVVTGETGEILRAKVREISKNLKSIRDEEMDAVAEELIQLCRNSNKSK

SEQ ID NO: 21 - protein, 442 aa, Artificial Sequence
  engineered beta-1,2-glycosyltransferase encoded in plasmid pA30347
MATNLRVLMFPWLAYGHISPFLNIAKQLADRGFLIYLCSTRINLESIIKKIPEKYADSIHLIELQLPELPELPPHYHTTNGPPPHLNPTLHKALKMSKPNFSRILQNLKPDLLIYDVLQPWAEHVANEQNIPAGKLLTSCAAVFSYFFSFRKNPGVEFPFPAIHLPEVEKVKIREILAKEPEEGGRLDEGNKQMMLMCTSRTIEAKYIDYCTELCNWKVVPVGPPFQDLITNDADNKELIDWLGTKHENSTVFVSFGSEYFLSKEDMEEVAFALELSNVNFIWVARFPKGEERNLEDALPKGFLERIGERGRVLDKFAPQPRILNHPSTGGFISHCGWNSAMESIDFGVPIIAMPIHNDQPINAKLMVELGVAVEIVRDDDGKIHRGEIAETLKSVVTGETGEILRAKVREISKNLKSIRDEEMDAVAEELIQLCRNSNKSK

SEQ ID NO: 22 - protein, 442 aa, Artificial Sequence
  engineered beta-1,2-glycosyltransferase encoded in plasmid pA30348
MATNLRVLMFPWLAYGHISPFLNIAKQLADRGFLIYLCSTRINLESIIKKIPEKYADSIHLIELQLPELPELPPHYHTTNGAPPHLNPTLHKALKMSKPNFSRILQNLKPDLLIYDVLQPWAEHVANEQNIPAGKLLTSCAAVFSYFFSFRKNPGVEFPFPAIHLPEVEKVKIREILAKEPEEGGRLDEGNKQMMLMCTSRTIEAKYIDYCTELCNWKVVPVGPPFQDLITNDADNKELIDWLGTKHENSTVFVSFGSEYFLSKEDMEEVAFALELSNVNFIWVARFPKGEERNLEDALPKGFLERIGERGRVLDKFAPQPRILNHPSTGGFISHCGWNSAMESIDFGVPIIAMPIHNDQPINAKLMVELGVAVEIVRDDDGKIHRGEIAETLKSVVTGETGEILRAKVREISKNLKSIRDEEMDAVAEELIQLCRNSNKSK

SEQ ID NO: 23 - protein, 442 aa, Artificial Sequence
  engineered beta-1,2-glycosyltransferase encoded in plasmid pA30350
MATNLRVLMFPWLAYGHISPFLNIAKQLADRGFLIYLCSTRINLESIIKKIPEKYADSIHLIELQLPELPELPPHYHTTNGIPPHLNPTLHKALKMSKPNFSRILQNLKPDLLIYDVLQPWAEHVANEQNIPAGKLLTSCAAVFSYFFSFRKNPGVEFPFPAIHLPEVEKVKIREILAKEPEEGGRLDEGNKQMMLMCTSRTIEAKYIDYCTELCNWKVVPVGPPFQDLITNDADNKELIDWLGTKHENSTVFVSFGSEYFLSKEDMEEVAFALELSNVNFIWVARFPKGEERNLEDALPKGFLERIGERGRVLDKFAPQPRILNHPSTGGFISHCGWNSAMESIDFGVPIIAMPIHNDQPINAKLMVELGVAVEIVRDDDGKIHRGEIAETLKSVVTGETGEILRAKVREISKNLKSIRDEEMDAVAEELIQLCRNSNKSK

SEQ ID NO: 24 - protein, 442 aa, Artificial Sequence
  engineered beta-1,2-glycosyltransferase encoded in plasmid pA30351
MATNLRVLMFPWLAYGHISPFLNIAKQLADRGFLIYLCSTRINLESIIKKIPEKYADSIHLIELQLPELPELPPHYHTTNGMPPHLNPTLHKALKMSKPNFSRILQNLKPDLLIYDVLQPWAEHVANEQNIPAGKLLTSCAAVFSYFFSFRKNPGVEFPFPAIHLPEVEKVKIREILAKEPEEGGRLDEGNKQMMLMCTSRTIEAKYIDYCTELCNWKVVPVGPPFQDLITNDADNKELIDWLGTKHENSTVFVSFGSEYFLSKEDMEEVAFALELSNVNFIWVARFPKGEERNLEDALPKGFLERIGERGRVLDKFAPQPRILNHPSTGGFISHCGWNSAMESIDFGVPIIAMPIHNDQPINAKLMVELGVAVEIVRDDDGKIHRGEIAETLKSVVTGETGEILRAKVREISKNLKSIRDEEMDAVAEELIQLCRNSNKSK

SEQ ID NO: 25 - protein, 442 aa, Artificial Sequence
  engineered beta-1,2-glycosyltransferase encoded in plasmid pA30352
MATNLRVLMFPWLAYGHISPFLNIAKQLADRGFLIYLCSTRINLESIIKKIPEKYADSIHLIELQLPELPELPPHYHTTNGCPPHLNPTLHKALKMSKPNFSRILQNLKPDLLIYDVLQPWAEHVANEQNIPAGKLLTSCAAVFSYFFSFRKNPGVEFPFPAIHLPEVEKVKIREILAKEPEEGGRLDEGNKQMMLMCTSRTIEAKYIDYCTELCNWKVVPVGPPFQDLITNDADNKELIDWLGTKHENSTVFVSFGSEYFLSKEDMEEVAFALELSNVNFIWVARFPKGEERNLEDALPKGFLERIGERGRVLDKFAPQPRILNHPSTGGFISHCGWNSAMESIDFGVPIIAMPIHNDQPINAKLMVELGVAVEIVRDDDGKIHRGEIAETLKSVVTGETGEILRAKVREISKNLKSIRDEEMDAVAEELIQLCRNSNKSK

SEQ ID NO: 26 - protein, 442 aa, Artificial Sequence
  engineered beta-1,2-glycosyltransferase encoded in plasmid pA30354
MATNLRVLMFPWLAYGHISPFLNIAKQLADRGFLIYLCSTRINLESIIKKIPEKYADSIHLIELQLPELPELPPHYHTTNGYPPHLNPTLHKALKMSKPNFSRILQNLKPDLLIYDVLQPWAEHVANEQNIPAGKLLTSCAAVFSYFFSFRKNPGVEFPFPAIHLPEVEKVKIREILAKEPEEGGRLDEGNKQMMLMCTSRTIEAKYIDYCTELCNWKVVPVGPPFQDLITNDADNKELIDWLGTKHENSTVFVSFGSEYFLSKEDMEEVAFALELSNVNFIWVARFPKGEERNLEDALPKGFLERIGERGRVLDKFAPQPRILNHPSTGGFISHCGWNSAMESIDFGVPIIAMPIHNDQPINAKLMVELGVAVEIVRDDDGKIHRGEIAETLKSVVTGETGEILRAKVREISKNLKSIRDEEMDAVAEELIQLCRNSNKSK

SEQ ID NO: 27 - protein, 442 aa, Artificial Sequence
  engineered beta-1,2-glycosyltransferase encoded in plasmid pA30358
MATNLRVLMFPWLAYGHISPFLNIAKQLADRGFLIYLCSTRINLESIIKKIPEKYADSIHLIELQLPELPELPPHYHTTNGRPPHLNPTLHKALKMSKPNFSRILQNLKPDLLIYDVLQPWAEHVANEQNIPAGKLLTSCAAVFSYFFSFRKNPGVEFPFPAIHLPEVEKVKIREILAKEPEEGGRLDEGNKQMMLMCTSRTIEAKYIDYCTELCNWKVVPVGPPFQDLITNDADNKELIDWLGTKHENSTVFVSFGSEYFLSKEDMEEVAFALELSNVNFIWVARFPKGEERNLEDALPKGFLERIGERGRVLDKFAPQPRILNHPSTGGFISHCGWNSAMESIDFGVPIIAMPIHNDQPINAKLMVELGVAVEIVRDDDGKIHRGEIAETLKSVVTGETGEILRAKVREISKNLKSIRDEEMDAVAEELIQLCRNSNKSK

SEQ ID NO: 28 - protein, 442 aa, Artificial Sequence
  engineered beta-1,2-glycosyltransferase encoded in plasmid pA30362
MATNLRVLMFPWLAYGHISPFLNIAKQLADRGFLIYLCSTRINLESIIKKIPEKYADSIHLIELQLPELPELPPHYHTTNGDPPHLNPTLHKALKMSKPNFSRILQNLKPDLLIYDVLQPWAEHVANEQNIPAGKLLTSCAAVFSYFFSFRKNPGVEFPFPAIHLPEVEKVKIREILAKEPEEGGRLDEGNKQMMLMCTSRTIEAKYIDYCTELCNWKVVPVGPPFQDLITNDADNKELIDWLGTKHENSTVFVSFGSEYFLSKEDMEEVAFALELSNVNFIWVARFPKGEERNLEDALPKGFLERIGERGRVLDKFAPQPRILNHPSTGGFISHCGWNSAMESIDFGVPIIAMPIHNDQPINAKLMVELGVAVEIVRDDDGKIHRGEIAETLKSVVTGETGEILRAKVREISKNLKSIRDEEMDAVAEELIQLCRNSNKSK

SEQ ID NO: 29 - protein, 442 aa, Artificial Sequence
  engineered beta-1,2-glycosyltransferase encoded in plasmid pA30463
MATNLRVLMFPWLAYGHISPFLNIAKQLADRGFLIYLCSTRINLESIIKKIPEKYADSIHLIELQLPELPELPPHYHTTNGLPPHLNLTLHKALKMSKPNFSRILQNLKPDLLIYDVLQPWAEHVANEQNIPAGKLLTSCAAVFSYFFSFRKNPGVEFPFPAIHLPEVEKVKIREILAKEPEEGGRLDEGNKQMMLMCTSRTIEAKYIDYCTELCNWKVVPVGPPFQDLITNDADNKELIDWLGTKHENSTVFVSFGSEYFLSKEDMEEVAFALELSNVNFIWVARFPKGEERNLEDALPKGFLERIGERGRVLDKFAPQPRILNHPSTGGFISHCGWNSAMESIDFGVPIIAMPIHNDQPINAKLMVELGVAVEIVRDDDGKIHRGEIAETLKSVVTGETGEILRAKVREISKNLKSIRDEEMDAVAEELIQLCRNSNKSK

SEQ ID NO: 30 - protein, 442 aa, Artificial Sequence
  engineered beta-1,2-glycosyltransferase encoded in plasmid pA30468
MATNLRVLMFPWLAYGHISPFLNIAKQLADRGFLIYLCSTRINLESIIKKIPEKYADSIHLIELQLPELPELPPHYHTTNGLPPHLNYTLHKALKMSKPNFSRILQNLKPDLLIYDVLQPWAEHVANEQNIPAGKLLTSCAAVFSYFFSFRKNPGVEFPFPAIHLPEVEKVKIREILAKEPEEGGRLDEGNKQMMLMCTSRTIEAKYIDYCTELCNWKVVPVGPPFQDLITNDADNKELIDWLGTKHENSTVFVSFGSEYFLSKEDMEEVAFALELSNVNFIWVARFPKGEERNLEDALPKGFLERIGERGRVLDKFAPQPRILNHPSTGGFISHCGWNSAMESIDFGVPIIAMPIHNDQPINAKLMVELGVAVEIVRDDDGKIHRGEIAETLKSVVTGETGEILRAKVREISKNLKSIRDEEMDAVAEELIQLCRNSNKSK

SEQ ID NO: 31 - protein, 442 aa, Artificial Sequence
  engineered beta-1,2-glycosyltransferase encoded in plasmid pA30471
MATNLRVLMFPWLAYGHISPFLNIAKQLADRGFLIYLCSTRINLESIIKKIPEKYADSIHLIELQLPELPELPPHYHTTNGLPPHLNKTLHKALKMSKPNFSRILQNLKPDLLIYDVLQPWAEHVANEQNIPAGKLLTSCAAVFSYFFSFRKNPGVEFPFPAIHLPEVEKVKIREILAKEPEEGGRLDEGNKQMMLMCTSRTIEAKYIDYCTELCNWKVVPVGPPFQDLITNDADNKELIDWLGTKHENSTVFVSFGSEYFLSKEDMEEVAFALELSNVNFIWVARFPKGEERNLEDALPKGFLERIGERGRVLDKFAPQPRILNHPSTGGFISHCGWNSAMESIDFGVPIIAMPIHNDQPINAKLMVELGVAVEIVRDDDGKIHRGEIAETLKSVVTGETGEILRAKVREISKNLKSIRDEEMDAVAEELIQLCRNSNKSK

SEQ ID NO: 32 - protein, 442 aa, Artificial Sequence
  engineered beta-1,2-glycosyltransferase encoded in plasmid pA30472
MATNLRVLMFPWLAYGHISPFLNIAKQLADRGFLIYLCSTRINLESIIKKIPEKYADSIHLIELQLPELPELPPHYHTTNGLPPHLNRTLHKALKMSKPNFSRILQNLKPDLLIYDVLQPWAEHVANEQNIPAGKLLTSCAAVFSYFFSFRKNPGVEFPFPAIHLPEVEKVKIREILAKEPEEGGRLDEGNKQMMLMCTSRTIEAKYIDYCTELCNWKVVPVGPPFQDLITNDADNKELIDWLGTKHENSTVFVSFGSEYFLSKEDMEEVAFALELSNVNFIWVARFPKGEERNLEDALPKGFLERIGERGRVLDKFAPQPRILNHPSTGGFISHCGWNSAMESIDFGVPIIAMPIHNDQPINAKLMVELGVAVEIVRDDDGKIHRGEIAETLKSVVTGETGEILRAKVREISKNLKSIRDEEMDAVAEELIQLCRNSNKSK

SEQ ID NO: 33 - protein, 442 aa, Artificial Sequence
  engineered beta-1,2-glycosyltransferase encoded in plasmid pA30473
MATNLRVLMFPWLAYGHISPFLNIAKQLADRGFLIYLCSTRINLESIIKKIPEKYADSIHLIELQLPELPELPPHYHTTNGLPPHLNQTLHKALKMSKPNFSRILQNLKPDLLIYDVLQPWAEHVANEQNIPAGKLLTSCAAVFSYFFSFRKNPGVEFPFPAIHLPEVEKVKIREILAKEPEEGGRLDEGNKQMMLMCTSRTIEAKYIDYCTELCNWKVVPVGPPFQDLITNDADNKELIDWLGTKHENSTVFVSFGSEYFLSKEDMEEVAFALELSNVNFIWVARFPKGEERNLEDALPKGFLERIGERGRVLDKFAPQPRILNHPSTGGFISHCGWNSAMESIDFGVPIIAMPIHNDQPINAKLMVELGVAVEIVRDDDGKIHRGEIAETLKSVVTGETGEILRAKVREISKNLKSIRDEEMDAVAEELIQLCRNSNKSK

SEQ ID NO: 34 - protein, 442 aa, Artificial Sequence
  engineered beta-1,2-glycosyltransferase encoded in plasmid pA30557
MATNLRVLMFPWLAYGHISPFLNIAKQLADRGFLIYLCSTRINLESIIKKIPEKYADSIHLIELQLPELPELPPHYHTTNGLPPHLNPTLHKALKMSKPNFSRILQNLKPDLLIYDVLQPWAEHVANEQNIPAGKLLTACAAVFSYFFSFRKNPGVEFPFPAIHLPEVEKVKIREILAKEPEEGGRLDEGNKQMMLMCTSRTIEAKYIDYCTELCNWKVVPVGPPFQDLITNDADNKELIDWLGTKHENSTVFVSFGSEYFLSKEDMEEVAFALELSNVNFIWVARFPKGEERNLEDALPKGFLERIGERGRVLDKFAPQPRILNHPSTGGFISHCGWNSAMESIDFGVPIIAMPIHNDQPINAKLMVELGVAVEIVRDDDGKIHRGEIAETLKSVVTGETGEILRAKVREISKNLKSIRDEEMDAVAEELIQLCRNSNKSK

SEQ ID NO: 35 - protein, 442 aa, Artificial Sequence
  engineered beta-1,2-glycosyltransferase encoded in plasmid pA30565
MATNLRVLMFPWLAYGHISPFLNIAKQLADRGFLIYLCSTRINLESIIKKIPEKYADSIHLIELQLPELPELPPHYHTTNGLPPHLNPTLHKALKMSKPNFSRILQNLKPDLLIYDVLQPWAEHVANEQNIPAGKLLTWCAAVFSYFFSFRKNPGVEFPFPAIHLPEVEKVKIREILAKEPEEGGRLDEGNKQMMLMCTSRTIEAKYIDYCTELCNWKVVPVGPPFQDLITNDADNKELIDWLGTKHENSTVFVSFGSEYFLSKEDMEEVAFALELSNVNFIWVARFPKGEERNLEDALPKGFLERIGERGRVLDKFAPQPRILNHPSTGGFISHCGWNSAMESIDFGVPIIAMPIHNDQPINAKLMVELGVAVEIVRDDDGKIHRGEIAETLKSVVTGETGEILRAKVREISKNLKSIRDEEMDAVAEELIQLCRNSNKSK

SEQ ID NO: 36 - protein, 442 aa, Artificial Sequence
  engineered beta-1,2-glycosyltransferase encoded in plasmid pA30568
MATNLRVLMFPWLAYGHISPFLNIAKQLADRGFLIYLCSTRINLESIIKKIPEKYADSIHLIELQLPELPELPPHYHTTNGLPPHLNPTLHKALKMSKPNFSRILQNLKPDLLIYDVLQPWAEHVANEQNIPAGKLLTRCAAVFSYFFSFRKNPGVEFPFPAIHLPEVEKVKIREILAKEPEEGGRLDEGNKQMMLMCTSRTIEAKYIDYCTELCNWKVVPVGPPFQDLITNDADNKELIDWLGTKHENSTVFVSFGSEYFLSKEDMEEVAFALELSNVNFIWVARFPKGEERNLEDALPKGFLERIGERGRVLDKFAPQPRILNHPSTGGFISHCGWNSAMESIDFGVPIIAMPIHNDQPINAKLMVELGVAVEIVRDDDGKIHRGEIAETLKSVVTGETGEILRAKVREISKNLKSIRDEEMDAVAEELIQLCRNSNKSK

SEQ ID NO: 37 - protein, 442 aa, Artificial Sequence
  engineered beta-1,2-glycosyltransferase encoded in plasmid pA30569
MATNLRVLMFPWLAYGHISPFLNIAKQLADRGFLIYLCSTRINLESIIKKIPEKYADSIHLIELQLPELPELPPHYHTTNGLPPHLNPTLHKALKMSKPNFSRILQNLKPDLLIYDVLQPWAEHVANEQNIPAGKLLTQCAAVFSYFFSFRKNPGVEFPFPAIHLPEVEKVKIREILAKEPEEGGRLDEGNKQMMLMCTSRTIEAKYIDYCTELCNWKVVPVGPPFQDLITNDADNKELIDWLGTKHENSTVFVSFGSEYFLSKEDMEEVAFALELSNVNFIWVARFPKGEERNLEDALPKGFLERIGERGRVLDKFAPQPRILNHPSTGGFISHCGWNSAMESIDFGVPIIAMPIHNDQPINAKLMVELGVAVEIVRDDDGKIHRGEIAETLKSVVTGETGEILRAKVREISKNLKSIRDEEMDAVAEELIQLCRNSNKSK

SEQ ID NO: 38 - protein, 442 aa, Artificial Sequence
  engineered beta-1,2-glycosyltransferase encoded in plasmid pA30570
MATNLRVLMFPWLAYGHISPFLNIAKQLADRGFLIYLCSTRINLESIIKKIPEKYADSIHLIELQLPELPELPPHYHTTNGLPPHLNPTLHKALKMSKPNFSRILQNLKPDLLIYDVLQPWAEHVANEQNIPAGKLLTNCAAVFSYFFSFRKNPGVEFPFPAIHLPEVEKVKIREILAKEPEEGGRLDEGNKQMMLMCTSRTIEAKYIDYCTELCNWKVVPVGPPFQDLITNDADNKELIDWLGTKHENSTVFVSFGSEYFLSKEDMEEVAFALELSNVNFIWVARFPKGEERNLEDALPKGFLERIGERGRVLDKFAPQPRILNHPSTGGFISHCGWNSAMESIDFGVPIIAMPIHNDQPINAKLMVELGVAVEIVRDDDGKIHRGEIAETLKSVVTGETGEILRAKVREISKNLKSIRDEEMDAVAEELIQLCRNSNKSK

SEQ ID NO: 39 - protein, 442 aa, Artificial Sequence
  engineered beta-1,2-glycosyltransferase encoded in plasmid pA30571
MATNLRVLMFPWLAYGHISPFLNIAKQLADRGFLIYLCSTRINLESIIKKIPEKYADSIHLIELQLPELPELPPHYHTTNGLPPHLNPTLHKALKMSKPNFSRILQNLKPDLLIYDVLQPWAEHVANEQNIPAGKLLTECAAVFSYFFSFRKNPGVEFPFPAIHLPEVEKVKIREILAKEPEEGGRLDEGNKQMMLMCTSRTIEAKYIDYCTELCNWKVVPVGPPFQDLITNDADNKELIDWLGTKHENSTVFVSFGSEYFLSKEDMEEVAFALELSNVNFIWVARFPKGEERNLEDALPKGFLERIGERGRVLDKFAPQPRILNHPSTGGFISHCGWNSAMESIDFGVPIIAMPIHNDQPINAKLMVELGVAVEIVRDDDGKIHRGEIAETLKSVVTGETGEILRAKVREISKNLKSIRDEEMDAVAEELIQLCRNSNKSK

SEQ ID NO: 40 - protein, 442 aa, Artificial Sequence
  engineered beta-1,2-glycosyltransferase encoded in plasmid pA30785
MATNLRVLMFPWLAYGHISPFLNIAKQLADRGFLIYLCSTRINLESIIKKIPEKYADSIHLIELQLPELPELPPHYHTTNGLPPHLNPTLHKALKMSKPNFSRILQNLKPDLLIYDVLQPWAEHVANEQNIPAGKLLTSCAAVFSYFFSFRKNPGVEFPFPAIHLPEVEKVKIREILAKEPEEGGRLDEGNKQMMLMCTSRTIEAKYIDYCTELCNWKVVPVGPPFQDLITNDADNKELIDWLGTKHENSTVFVSFGSEAFLSKEDMEEVAFALELSNVNFIWVARFPKGEERNLEDALPKGFLERIGERGRVLDKFAPQPRILNHPSTGGFISHCGWNSAMESIDFGVPIIAMPIHNDQPINAKLMVELGVAVEIVRDDDGKIHRGEIAETLKSVVTGETGEILRAKVREISKNLKSIRDEEMDAVAEELIQLCRNSNKSK

SEQ ID NO: 41 - protein, 442 aa, Artificial Sequence
  engineered beta-1,2-glycosyltransferase encoded in plasmid pA30787
MATNLRVLMFPWLAYGHISPFLNIAKQLADRGFLIYLCSTRINLESIIKKIPEKYADSIHLIELQLPELPELPPHYHTTNGLPPHLNPTLHKALKMSKPNFSRILQNLKPDLLIYDVLQPWAEHVANEQNIPAGKLLTSCAAVFSYFFSFRKNPGVEFPFPAIHLPEVEKVKIREILAKEPEEGGRLDEGNKQMMLMCTSRTIEAKYIDYCTELCNWKVVPVGPPFQDLITNDADNKELIDWLGTKHENSTVFVSFGSELFLSKEDMEEVAFALELSNVNFIWVARFPKGEERNLEDALPKGFLERIGERGRVLDKFAPQPRILNHPSTGGFISHCGWNSAMESIDFGVPIIAMPIHNDQPINAKLMVELGVAVEIVRDDDGKIHRGEIAETLKSVVTGETGEILRAKVREISKNLKSIRDEEMDAVAEELIQLCRNSNKSK

SEQ ID NO: 42 - protein, 442 aa, Artificial Sequence
  engineered beta-1,2-glycosyltransferase encoded in plasmid pA30790
MATNLRVLMFPWLAYGHISPFLNIAKQLADRGFLIYLCSTRINLESIIKKIPEKYADSIHLIELQLPELPELPPHYHTTNGLPPHLNPTLHKALKMSKPNFSRILQNLKPDLLIYDVLQPWAEHVANEQNIPAGKLLTSCAAVFSYFFSFRKNPGVEFPFPAIHLPEVEKVKIREILAKEPEEGGRLDEGNKQMMLMCTSRTIEAKYIDYCTELCNWKVVPVGPPFQDLITNDADNKELIDWLGTKHENSTVFVSFGSECFLSKEDMEEVAFALELSNVNFIWVARFPKGEERNLEDALPKGFLERIGERGRVLDKFAPQPRILNHPSTGGFISHCGWNSAMESIDFGVPIIAMPIHNDQPINAKLMVELGVAVEIVRDDDGKIHRGEIAETLKSVVTGETGEILRAKVREISKNLKSIRDEEMDAVAEELIQLCRNSNKSK

SEQ ID NO: 43 - protein, 442 aa, Artificial Sequence
  engineered beta-1,2-glycosyltransferase encoded in plasmid pA30791
MATNLRVLMFPWLAYGHISPFLNIAKQLADRGFLIYLCSTRINLESIIKKIPEKYADSIHLIELQLPELPELPPHYHTTNGLPPHLNPTLHKALKMSKPNFSRILQNLKPDLLIYDVLQPWAEHVANEQNIPAGKLLTSCAAVFSYFFSFRKNPGVEFPFPAIHLPEVEKVKIREILAKEPEEGGRLDEGNKQMMLMCTSRTIEAKYIDYCTELCNWKVVPVGPPFQDLITNDADNKELIDWLGTKHENSTVFVSFGSEFFLSKEDMEEVAFALELSNVNFIWVARFPKGEERNLEDALPKGFLERIGERGRVLDKFAPQPRILNHPSTGGFISHCGWNSAMESIDFGVPIIAMPIHNDQPINAKLMVELGVAVEIVRDDDGKIHRGEIAETLKSVVTGETGEILRAKVREISKNLKSIRDEEMDAVAEELIQLCRNSNKSK

SEQ ID NO: 44 - protein, 442 aa, Artificial Sequence
  engineered beta-1,2-glycosyltransferase encoded in plasmid pA30793
MATNLRVLMFPWLAYGHISPFLNIAKQLADRGFLIYLCSTRINLESIIKKIPEKYADSIHLIELQLPELPELPPHYHTTNGLPPHLNPTLHKALKMSKPNFSRILQNLKPDLLIYDVLQPWAEHVANEQNIPAGKLLTSCAAVFSYFFSFRKNPGVEFPFPAIHLPEVEKVKIREILAKEPEEGGRLDEGNKQMMLMCTSRTIEAKYIDYCTELCNWKVVPVGPPFQDLITNDADNKELIDWLGTKHENSTVFVSFGSEHFLSKEDMEEVAFALELSNVNFIWVARFPKGEERNLEDALPKGFLERIGERGRVLDKFAPQPRILNHPSTGGFISHCGWNSAMESIDFGVPIIAMPIHNDQPINAKLMVELGVAVEIVRDDDGKIHRGEIAETLKSVVTGETGEILRAKVREISKNLKSIRDEEMDAVAEELIQLCRNSNKSK

SEQ ID NO: 45 - protein, 442 aa, Artificial Sequence
  engineered beta-1,2-glycosyltransferase encoded in plasmid pA30796
MATNLRVLMFPWLAYGHISPFLNIAKQLADRGFLIYLCSTRINLESIIKKIPEKYADSIHLIELQLPELPELPPHYHTTNGLPPHLNPTLHKALKMSKPNFSRILQNLKPDLLIYDVLQPWAEHVANEQNIPAGKLLTSCAAVFSYFFSFRKNPGVEFPFPAIHLPEVEKVKIREILAKEPEEGGRLDEGNKQMMLMCTSRTIEAKYIDYCTELCNWKVVPVGPPFQDLITNDADNKELIDWLGTKHENSTVFVSFGSEQFLSKEDMEEVAFALELSNVNFIWVARFPKGEERNLEDALPKGFLERIGERGRVLDKFAPQPRILNHPSTGGFISHCGWNSAMESIDFGVPIIAMPIHNDQPINAKLMVELGVAVEIVRDDDGKIHRGEIAETLKSVVTGETGEILRAKVREISKNLKSIRDEEMDAVAEELIQLCRNSNKSK

SEQ ID NO: 46 - protein, 442 aa, Artificial Sequence
  engineered beta-1,2-glycosyltransferase encoded in plasmid pA30797
MATNLRVLMFPWLAYGHISPFLNIAKQLADRGFLIYLCSTRINLESIIKKIPEKYADSIHLIELQLPELPELPPHYHTTNGLPPHLNPTLHKALKMSKPNFSRILQNLKPDLLIYDVLQPWAEHVANEQNIPAGKLLTSCAAVFSYFFSFRKNPGVEFPFPAIHLPEVEKVKIREILAKEPEEGGRLDEGNKQMMLMCTSRTIEAKYIDYCTELCNWKVVPVGPPFQDLITNDADNKELIDWLGTKHENSTVFVSFGSENFLSKEDMEEVAFALELSNVNFIWVARFPKGEERNLEDALPKGFLERIGERGRVLDKFAPQPRILNHPSTGGFISHCGWNSAMESIDFGVPIIAMPIHNDQPINAKLMVELGVAVEIVRDDDGKIHRGEIAETLKSVVTGETGEILRAKVREISKNLKSIRDEEMDAVAEELIQLCRNSNKSK

SEQ ID NO: 47 - protein, 442 aa, Artificial Sequence
  engineered beta-1,2-glycosyltransferase encoded in plasmid pA30798
MATNLRVLMFPWLAYGHISPFLNIAKQLADRGFLIYLCSTRINLESIIKKIPEKYADSIHLIELQLPELPELPPHYHTTNGLPPHLNPTLHKALKMSKPNFSRILQNLKPDLLIYDVLQPWAEHVANEQNIPAGKLLTSCAAVFSYFFSFRKNPGVEFPFPAIHLPEVEKVKIREILAKEPEEGGRLDEGNKQMMLMCTSRTIEAKYIDYCTELCNWKVVPVGPPFQDLITNDADNKELIDWLGTKHENSTVFVSFGSEEFLSKEDMEEVAFALELSNVNFIWVARFPKGEERNLEDALPKGFLERIGERGRVLDKFAPQPRILNHPSTGGFISHCGWNSAMESIDFGVPIIAMPIHNDQPINAKLMVELGVAVEIVRDDDGKIHRGEIAETLKSVVTGETGEILRAKVREISKNLKSIRDEEMDAVAEELIQLCRNSNKSK

SEQ ID NO: 48 - protein, 442 aa, Artificial Sequence
  engineered beta-1,2-glycosyltransferase encoded in plasmid pA30799
MATNLRVLMFPWLAYGHISPFLNIAKQLADRGFLIYLCSTRINLESIIKKIPEKYADSIHLIELQLPELPELPPHYHTTNGLPPHLNPTLHKALKMSKPNFSRILQNLKPDLLIYDVLQPWAEHVANEQNIPAGKLLTSCAAVFSYFFSFRKNPGVEFPFPAIHLPEVEKVKIREILAKEPEEGGRLDEGNKQMMLMCTSRTIEAKYIDYCTELCNWKVVPVGPPFQDLITNDADNKELIDWLGTKHENSTVFVSFGSEDFLSKEDMEEVAFALELSNVNFIWVARFPKGEERNLEDALPKGFLERIGERGRVLDKFAPQPRILNHPSTGGFISHCGWNSAMESIDFGVPIIAMPIHNDQPINAKLMVELGVAVEIVRDDDGKIHRGEIAETLKSVVTGETGEILRAKVREISKNLKSIRDEEMDAVAEELIQLCRNSNKSK

SEQ ID NO: 49 - protein, 442 aa, Artificial Sequence
  engineered beta-1,2-glycosyltransferase encoded in plasmid pA30802
MATNLRVLMFPWLAYGHISPFLNIAKQLADRGFLIYLCSTRINLESIIKKIPEKYADSIHLIELQLPELPELPPHYHTTNGLPPHLNPTLHKALKMSKPNFSRILQNLKPDLLIYDVLQPWAEHVANEQNIPAGKLLTSCAAVFSYFFSFRKNPGVEFPFPAIHLPEVEKVKIREILAKEPEEGGRLDEGNKQMMLMCTSRTIEAKYIDYCTELCNWKVVPVGPPFQDLITNDADNKELIDWLGTKHENSTVFVSFGSEYFLSKEDMEEVAFALELSNVNFIWGARFPKGEERNLEDALPKGFLERIGERGRVLDKFAPQPRILNHPSTGGFISHCGWNSAMESIDFGVPIIAMPIHNDQPINAKLMVELGVAVEIVRDDDGKIHRGEIAETLKSVVTGETGEILRAKVREISKNLKSIRDEEMDAVAEELIQLCRNSNKSK

SEQ ID NO: 50 - protein, 442 aa, Artificial Sequence
  engineered beta-1,2-glycosyltransferase encoded in plasmid pA30803
MATNLRVLMFPWLAYGHISPFLNIAKQLADRGFLIYLCSTRINLESIIKKIPEKYADSIHLIELQLPELPELPPHYHTTNGLPPHLNPTLHKALKMSKPNFSRILQNLKPDLLIYDVLQPWAEHVANEQNIPAGKLLTSCAAVFSYFFSFRKNPGVEFPFPAIHLPEVEKVKIREILAKEPEEGGRLDEGNKQMMLMCTSRTIEAKYIDYCTELCNWKVVPVGPPFQDLITNDADNKELIDWLGTKHENSTVFVSFGSEYFLSKEDMEEVAFALELSNVNFIWPARFPKGEERNLEDALPKGFLERIGERGRVLDKFAPQPRILNHPSTGGFISHCGWNSAMESIDFGVPIIAMPIHNDQPINAKLMVELGVAVEIVRDDDGKIHRGEIAETLKSVVTGETGEILRAKVREISKNLKSIRDEEMDAVAEELIQLCRNSNKSK

SEQ ID NO: 51 - protein, 442 aa, Artificial Sequence
  engineered beta-1,2-glycosyltransferase encoded in plasmid pA30805
MATNLRVLMFPWLAYGHISPFLNIAKQLADRGFLIYLCSTRINLESIIKKIPEKYADSIHLIELQLPELPELPPHYHTTNGLPPHLNPTLHKALKMSKPNFSRILQNLKPDLLIYDVLQPWAEHVANEQNIPAGKLLTSCAAVFSYFFSFRKNPGVEFPFPAIHLPEVEKVKIREILAKEPEEGGRLDEGNKQMMLMCTSRTIEAKYIDYCTELCNWKVVPVGPPFQDLITNDADNKELIDWLGTKHENSTVFVSFGSEYFLSKEDMEEVAFALELSNVNFIWLARFPKGEERNLEDALPKGFLERIGERGRVLDKFAPQPRILNHPSTGGFISHCGWNSAMESIDFGVPIIAMPIHNDQPINAKLMVELGVAVEIVRDDDGKIHRGEIAETLKSVVTGETGEILRAKVREISKNLKSIRDEEMDAVAEELIQLCRNSNKSK

SEQ ID NO: 52 - protein, 442 aa, Artificial Sequence
  engineered beta-1,2-glycosyltransferase encoded in plasmid pA30806
MATNLRVLMFPWLAYGHISPFLNIAKQLADRGFLIYLCSTRINLESIIKKIPEKYADSIHLIELQLPELPELPPHYHTTNGLPPHLNPTLHKALKMSKPNFSRILQNLKPDLLIYDVLQPWAEHVANEQNIPAGKLLTSCAAVFSYFFSFRKNPGVEFPFPAIHLPEVEKVKIREILAKEPEEGGRLDEGNKQMMLMCTSRTIEAKYIDYCTELCNWKVVPVGPPFQDLITNDADNKELIDWLGTKHENSTVFVSFGSEYFLSKEDMEEVAFALELSNVNFIWIARFPKGEERNLEDALPKGFLERIGERGRVLDKFAPQPRILNHPSTGGFISHCGWNSAMESIDFGVPIIAMPIHNDQPINAKLMVELGVAVEIVRDDDGKIHRGEIAETLKSVVTGETGEILRAKVREISKNLKSIRDEEMDAVAEELIQLCRNSNKSK

SEQ ID NO: 53 - protein, 442 aa, Artificial Sequence
  engineered beta-1,2-glycosyltransferase encoded in plasmid pA30808
MATNLRVLMFPWLAYGHISPFLNIAKQLADRGFLIYLCSTRINLESIIKKIPEKYADSIHLIELQLPELPELPPHYHTTNGLPPHLNPTLHKALKMSKPNFSRILQNLKPDLLIYDVLQPWAEHVANEQNIPAGKLLTSCAAVFSYFFSFRKNPGVEFPFPAIHLPEVEKVKIREILAKEPEEGGRLDEGNKQMMLMCTSRTIEAKYIDYCTELCNWKVVPVGPPFQDLITNDADNKELIDWLGTKHENSTVFVSFGSEYFLSKEDMEEVAFALELSNVNFIWCARFPKGEERNLEDALPKGFLERIGERGRVLDKFAPQPRILNHPSTGGFISHCGWNSAMESIDFGVPIIAMPIHNDQPINAKLMVELGVAVEIVRDDDGKIHRGEIAETLKSVVTGETGEILRAKVREISKNLKSIRDEEMDAVAEELIQLCRNSNKSK

SEQ ID NO: 54 - protein, 442 aa, Artificial Sequence
  engineered beta-1,2-glycosyltransferase encoded in plasmid pA30811
MATNLRVLMFPWLAYGHISPFLNIAKQLADRGFLIYLCSTRINLESIIKKIPEKYADSIHLIELQLPELPELPPHYHTTNGLPPHLNPTLHKALKMSKPNFSRILQNLKPDLLIYDVLQPWAEHVANEQNIPAGKLLTSCAAVFSYFFSFRKNPGVEFPFPAIHLPEVEKVKIREILAKEPEEGGRLDEGNKQMMLMCTSRTIEAKYIDYCTELCNWKVVPVGPPFQDLITNDADNKELIDWLGTKHENSTVFVSFGSEYFLSKEDMEEVAFALELSNVNFIWWARFPKGEERNLEDALPKGFLERIGERGRVLDKFAPQPRILNHPSTGGFISHCGWNSAMESIDFGVPIIAMPIHNDQPINAKLMVELGVAVEIVRDDDGKIHRGEIAETLKSVVTGETGEILRAKVREISKNLKSIRDEEMDAVAEELIQLCRNSNKSK

SEQ ID NO: 55 - protein, 442 aa, Artificial Sequence
  engineered beta-1,2-glycosyltransferase encoded in plasmid pA30812
MATNLRVLMFPWLAYGHISPFLNIAKQLADRGFLIYLCSTRINLESIIKKIPEKYADSIHLIELQLPELPELPPHYHTTNGLPPHLNPTLHKALKMSKPNFSRILQNLKPDLLIYDVLQPWAEHVANEQNIPAGKLLTSCAAVFSYFFSFRKNPGVEFPFPAIHLPEVEKVKIREILAKEPEEGGRLDEGNKQMMLMCTSRTIEAKYIDYCTELCNWKVVPVGPPFQDLITNDADNKELIDWLGTKHENSTVFVSFGSEYFLSKEDMEEVAFALELSNVNFIWHARFPKGEERNLEDALPKGFLERIGERGRVLDKFAPQPRILNHPSTGGFISHCGWNSAMESIDFGVPIIAMPIHNDQPINAKLMVELGVAVEIVRDDDGKIHRGEIAETLKSVVTGETGEILRAKVREISKNLKSIRDEEMDAVAEELIQLCRNSNKSK

SEQ ID NO: 56 - protein, 442 aa, Artificial Sequence
  engineered beta-1,2-glycosyltransferase encoded in plasmid pA30814
MATNLRVLMFPWLAYGHISPFLNIAKQLADRGFLIYLCSTRINLESIIKKIPEKYADSIHLIELQLPELPELPPHYHTTNGLPPHLNPTLHKALKMSKPNFSRILQNLKPDLLIYDVLQPWAEHVANEQNIPAGKLLTSCAAVFSYFFSFRKNPGVEFPFPAIHLPEVEKVKIREILAKEPEEGGRLDEGNKQMMLMCTSRTIEAKYIDYCTELCNWKVVPVGPPFQDLITNDADNKELIDWLGTKHENSTVFVSFGSEYFLSKEDMEEVAFALELSNVNFIWRARFPKGEERNLEDALPKGFLERIGERGRVLDKFAPQPRILNHPSTGGFISHCGWNSAMESIDFGVPIIAMPIHNDQPINAKLMVELGVAVEIVRDDDGKIHRGEIAETLKSVVTGETGEILRAKVREISKNLKSIRDEEMDAVAEELIQLCRNSNKSK

SEQ ID NO: 57 - protein, 442 aa, Artificial Sequence
  engineered beta-1,2-glycosyltransferase encoded in plasmid pA30817
MATNLRVLMFPWLAYGHISPFLNIAKQLADRGFLIYLCSTRINLESIIKKIPEKYADSIHLIELQLPELPELPPHYHTTNGLPPHLNPTLHKALKMSKPNFSRILQNLKPDLLIYDVLQPWAEHVANEQNIPAGKLLTSCAAVFSYFFSFRKNPGVEFPFPAIHLPEVEKVKIREILAKEPEEGGRLDEGNKQMMLMCTSRTIEAKYIDYCTELCNWKVVPVGPPFQDLITNDADNKELIDWLGTKHENSTVFVSFGSEYFLSKEDMEEVAFALELSNVNFIWEARFPKGEERNLEDALPKGFLERIGERGRVLDKFAPQPRILNHPSTGGFISHCGWNSAMESIDFGVPIIAMPIHNDQPINAKLMVELGVAVEIVRDDDGKIHRGEIAETLKSVVTGETGEILRAKVREISKNLKSIRDEEMDAVAEELIQLCRNSNKSK

SEQ ID NO: 58 - protein, 442 aa, Artificial Sequence
  engineered beta-1,2-glycosyltransferase encoded in plasmid pA30820
MATNLRVLMFPWLAYGHISPFLNIAKQLADRGFLIYLCSTRINLESIIKKIPEKYADSIHLIELQLPELPELPPHYHTTNGLPPHLNPTLHKALKMSKPNFSRILQNLKPDLLIYDVLQPWAEHVANEQNIPAGKLLTSCAAVFSYFFSFRKNPGVEFPFPAIHLPEVEKVKIREILAKEPEEGGRLDEGNKQMMLMCTSRTIEAKYIDYCTELCNWKVVPVGPPFQDLITNDADNKELIDWLGTKHENSTVFVSFGSEYFLSKEDMEEVAFALELSNVNFIWTARFPKGEERNLEDALPKGFLERIGERGRVLDKFAPQPRILNHPSTGGFISHCGWNSAMESIDFGVPIIAMPIHNDQPINAKLMVELGVAVEIVRDDDGKIHRGEIAETLKSVVTGETGEILRAKVREISKNLKSIRDEEMDAVAEELIQLCRNSNKSK

SEQ ID NO: 59 - protein, 442 aa, Artificial Sequence
  engineered beta-1,2-glycosyltransferase encoded in plasmid pA30879
MATNLRVLMFPWLAYGHISPFLNIAKQLADRGFLIYLCSTRINLESIIKKIPEKYADSIHLIELQLPELPELPPHYHTTNGLPPHLNPTLHKALKMSKPNFSRILQNLKPDLLIYDVLQPWAEHVANEQNIPAGKLLTSCAAVFSYFFSFRKNPGVEFPFPAIHLPEVEKVKIREILAKEPEEGGRLDEGNKQMMLMCTSRTIEAKYIDYCTELCNWKVVPVGPPFQDLITNDADNKELIDWLGTKHENSTVFVSFGSEYFLSKEDMEEVAFALELSNVNFIWVARFPKGEERNLEDALPKGFLERIGERGRVLDKPAPQPRILNHPSTGGFISHCGWNSAMESIDFGVPIIAMPIHNDQPINAKLMVELGVAVEIVRDDDGKIHRGEIAETLKSVVTGETGEILRAKVREISKNLKSIRDEEMDAVAEELIQLCRNSNKSK

SEQ ID NO: 60 - protein, 442 aa, Artificial Sequence
  engineered beta-1,2-glycosyltransferase encoded in plasmid pA30880
MATNLRVLMFPWLAYGHISPFLNIAKQLADRGFLIYLCSTRINLESIIKKIPEKYADSIHLIELQLPELPELPPHYHTTNGLPPHLNPTLHKALKMSKPNFSRILQNLKPDLLIYDVLQPWAEHVANEQNIPAGKLLTSCAAVFSYFFSFRKNPGVEFPFPAIHLPEVEKVKIREILAKEPEEGGRLDEGNKQMMLMCTSRTIEAKYIDYCTELCNWKVVPVGPPFQDLITNDADNKELIDWLGTKHENSTVFVSFGSEYFLSKEDMEEVAFALELSNVNFIWVARFPKGEERNLEDALPKGFLERIGERGRVLDKAAPQPRILNHPSTGGFISHCGWNSAMESIDFGVPIIAMPIHNDQPINAKLMVELGVAVEIVRDDDGKIHRGEIAETLKSVVTGETGEILRAKVREISKNLKSIRDEEMDAVAEELIQLCRNSNKSK

SEQ ID NO: 61 - protein, 442 aa, Artificial Sequence
  engineered beta-1,2-glycosyltransferase encoded in plasmid pA30882
MATNLRVLMFPWLAYGHISPFLNIAKQLADRGFLIYLCSTRINLESIIKKIPEKYADSIHLIELQLPELPELPPHYHTTNGLPPHLNPTLHKALKMSKPNFSRILQNLKPDLLIYDVLQPWAEHVANEQNIPAGKLLTSCAAVFSYFFSFRKNPGVEFPFPAIHLPEVEKVKIREILAKEPEEGGRLDEGNKQMMLMCTSRTIEAKYIDYCTELCNWKVVPVGPPFQDLITNDADNKELIDWLGTKHENSTVFVSFGSEYFLSKEDMEEVAFALELSNVNFIWVARFPKGEERNLEDALPKGFLERIGERGRVLDKLAPQPRILNHPSTGGFISHCGWNSAMESIDFGVPIIAMPIHNDQPINAKLMVELGVAVEIVRDDDGKIHRGEIAETLKSVVTGETGEILRAKVREISKNLKSIRDEEMDAVAEELIQLCRNSNKSK

SEQ ID NO: 62 - protein, 442 aa, Artificial Sequence
  engineered beta-1,2-glycosyltransferase encoded in plasmid pA30883
MATNLRVLMFPWLAYGHISPFLNIAKQLADRGFLIYLCSTRINLESIIKKIPEKYADSIHLIELQLPELPELPPHYHTTNGLPPHLNPTLHKALKMSKPNFSRILQNLKPDLLIYDVLQPWAEHVANEQNIPAGKLLTSCAAVFSYFFSFRKNPGVEFPFPAIHLPEVEKVKIREILAKEPEEGGRLDEGNKQMMLMCTSRTIEAKYIDYCTELCNWKVVPVGPPFQDLITNDADNKELIDWLGTKHENSTVFVSFGSEYFLSKEDMEEVAFALELSNVNFIWVARFPKGEERNLEDALPKGFLERIGERGRVLDKIAPQPRILNHPSTGGFISHCGWNSAMESIDFGVPIIAMPIHNDQPINAKLMVELGVAVEIVRDDDGKIHRGEIAETLKSVVTGETGEILRAKVREISKNLKSIRDEEMDAVAEELIQLCRNSNKSK

SEQ ID NO: 63 - protein, 442 aa, Artificial Sequence
  engineered beta-1,2-glycosyltransferase encoded in plasmid pA30884
MATNLRVLMFPWLAYGHISPFLNIAKQLADRGFLIYLCSTRINLESIIKKIPEKYADSIHLIELQLPELPELPPHYHTTNGLPPHLNPTLHKALKMSKPNFSRILQNLKPDLLIYDVLQPWAEHVANEQNIPAGKLLTSCAAVFSYFFSFRKNPGVEFPFPAIHLPEVEKVKIREILAKEPEEGGRLDEGNKQMMLMCTSRTIEAKYIDYCTELCNWKVVPVGPPFQDLITNDADNKELIDWLGTKHENSTVFVSFGSEYFLSKEDMEEVAFALELSNVNFIWVARFPKGEERNLEDALPKGFLERIGERGRVLDKMAPQPRILNHPSTGGFISHCGWNSAMESIDFGVPIIAMPIHNDQPINAKLMVELGVAVEIVRDDDGKIHRGEIAETLKSVVTGETGEILRAKVREISKNLKSIRDEEMDAVAEELIQLCRNSNKSK

SEQ ID NO: 64 - protein, 442 aa, Artificial Sequence
  engineered beta-1,2-glycosyltransferase encoded in plasmid pA30885
MATNLRVLMFPWLAYGHISPFLNIAKQLADRGFLIYLCSTRINLESIIKKIPEKYADSIHLIELQLPELPELPPHYHTTNGLPPHLNPTLHKALKMSKPNFSRILQNLKPDLLIYDVLQPWAEHVANEQNIPAGKLLTSCAAVFSYFFSFRKNPGVEFPFPAIHLPEVEKVKIREILAKEPEEGGRLDEGNKQMMLMCTSRTIEAKYIDYCTELCNWKVVPVGPPFQDLITNDADNKELIDWLGTKHENSTVFVSFGSEYFLSKEDMEEVAFALELSNVNFIWVARFPKGEERNLEDALPKGFLERIGERGRVLDKCAPQPRILNHPSTGGFISHCGWNSAMESIDFGVPIIAMPIHNDQPINAKLMVELGVAVEIVRDDDGKIHRGEIAETLKSVVTGETGEILRAKVREISKNLKSIRDEEMDAVAEELIQLCRNSNKSK

SEQ ID NO: 65 - protein, 442 aa, Artificial Sequence
  engineered beta-1,2-glycosyltransferase encoded in plasmid pA30886
MATNLRVLMFPWLAYGHISPFLNIAKQLADRGFLIYLCSTRINLESIIKKIPEKYADSIHLIELQLPELPELPPHYHTTNGLPPHLNPTLHKALKMSKPNFSRILQNLKPDLLIYDVLQPWAEHVANEQNIPAGKLLTSCAAVFSYFFSFRKNPGVEFPFPAIHLPEVEKVKIREILAKEPEEGGRLDEGNKQMMLMCTSRTIEAKYIDYCTELCNWKVVPVGPPFQDLITNDADNKELIDWLGTKHENSTVFVSFGSEYFLSKEDMEEVAFALELSNVNFIWVARFPKGEERNLEDALPKGFLERIGERGRVLDKYAPQPRILNHPSTGGFISHCGWNSAMESIDFGVPIIAMPIHNDQPINAKLMVELGVAVEIVRDDDGKIHRGEIAETLKSVVTGETGEILRAKVREISKNLKSIRDEEMDAVAEELIQLCRNSNKSK

SEQ ID NO: 66 - protein, 442 aa, Artificial Sequence
  engineered beta-1,2-glycosyltransferase encoded in plasmid pA30887
MATNLRVLMFPWLAYGHISPFLNIAKQLADRGFLIYLCSTRINLESIIKKIPEKYADSIHLIELQLPELPELPPHYHTTNGLPPHLNPTLHKALKMSKPNFSRILQNLKPDLLIYDVLQPWAEHVANEQNIPAGKLLTSCAAVFSYFFSFRKNPGVEFPFPAIHLPEVEKVKIREILAKEPEEGGRLDEGNKQMMLMCTSRTIEAKYIDYCTELCNWKVVPVGPPFQDLITNDADNKELIDWLGTKHENSTVFVSFGSEYFLSKEDMEEVAFALELSNVNFIWVARFPKGEERNLEDALPKGFLERIGERGRVLDKWAPQPRILNHPSTGGFISHCGWNSAMESIDFGVPIIAMPIHNDQPINAKLMVELGVAVEIVRDDDGKIHRGEIAETLKSVVTGETGEILRAKVREISKNLKSIRDEEMDAVAEELIQLCRNSNKSK

SEQ ID NO: 67 - protein, 442 aa, Artificial Sequence
  engineered beta-1,2-glycosyltransferase encoded in plasmid pA30888
MATNLRVLMFPWLAYGHISPFLNIAKQLADRGFLIYLCSTRINLESIIKKIPEKYADSIHLIELQLPELPELPPHYHTTNGLPPHLNPTLHKALKMSKPNFSRILQNLKPDLLIYDVLQPWAEHVANEQNIPAGKLLTSCAAVFSYFFSFRKNPGVEFPFPAIHLPEVEKVKIREILAKEPEEGGRLDEGNKQMMLMCTSRTIEAKYIDYCTELCNWKVVPVGPPFQDLITNDADNKELIDWLGTKHENSTVFVSFGSEYFLSKEDMEEVAFALELSNVNFIWVARFPKGEERNLEDALPKGFLERIGERGRVLDKHAPQPRILNHPSTGGFISHCGWNSAMESIDFGVPIIAMPIHNDQPINAKLMVELGVAVEIVRDDDGKIHRGEIAETLKSVVTGETGEILRAKVREISKNLKSIRDEEMDAVAEELIQLCRNSNKSK

SEQ ID NO: 68 - protein, 442 aa, Artificial Sequence
  engineered beta-1,2-glycosyltransferase encoded in plasmid pA30892
MATNLRVLMFPWLAYGHISPFLNIAKQLADRGFLIYLCSTRINLESIIKKIPEKYADSIHLIELQLPELPELPPHYHTTNGLPPHLNPTLHKALKMSKPNFSRILQNLKPDLLIYDVLQPWAEHVANEQNIPAGKLLTSCAAVFSYFFSFRKNPGVEFPFPAIHLPEVEKVKIREILAKEPEEGGRLDEGNKQMMLMCTSRTIEAKYIDYCTELCNWKVVPVGPPFQDLITNDADNKELIDWLGTKHENSTVFVSFGSEYFLSKEDMEEVAFALELSNVNFIWVARFPKGEERNLEDALPKGFLERIGERGRVLDKNAPQPRILNHPSTGGFISHCGWNSAMESIDFGVPIIAMPIHNDQPINAKLMVELGVAVEIVRDDDGKIHRGEIAETLKSVVTGETGEILRAKVREISKNLKSIRDEEMDAVAEELIQLCRNSNKSK

SEQ ID NO: 69 - protein, 442 aa, Artificial Sequence
  engineered beta-1,2-glycosyltransferase encoded in plasmid pA30894
MATNLRVLMFPWLAYGHISPFLNIAKQLADRGFLIYLCSTRINLESIIKKIPEKYADSIHLIELQLPELPELPPHYHTTNGLPPHLNPTLHKALKMSKPNFSRILQNLKPDLLIYDVLQPWAEHVANEQNIPAGKLLTSCAAVFSYFFSFRKNPGVEFPFPAIHLPEVEKVKIREILAKEPEEGGRLDEGNKQMMLMCTSRTIEAKYIDYCTELCNWKVVPVGPPFQDLITNDADNKELIDWLGTKHENSTVFVSFGSEYFLSKEDMEEVAFALELSNVNFIWVARFPKGEERNLEDALPKGFLERIGERGRVLDKDAPQPRILNHPSTGGFISHCGWNSAMESIDFGVPIIAMPIHNDQPINAKLMVELGVAVEIVRDDDGKIHRGEIAETLKSVVTGETGEILRAKVREISKNLKSIRDEEMDAVAEELIQLCRNSNKSK

SEQ ID NO: 70 - protein, 442 aa, Artificial Sequence
  engineered beta-1,2-glycosyltransferase encoded in plasmid pA30895
MATNLRVLMFPWLAYGHISPFLNIAKQLADRGFLIYLCSTRINLESIIKKIPEKYADSIHLIELQLPELPELPPHYHTTNGLPPHLNPTLHKALKMSKPNFSRILQNLKPDLLIYDVLQPWAEHVANEQNIPAGKLLTSCAAVFSYFFSFRKNPGVEFPFPAIHLPEVEKVKIREILAKEPEEGGRLDEGNKQMMLMCTSRTIEAKYIDYCTELCNWKVVPVGPPFQDLITNDADNKELIDWLGTKHENSTVFVSFGSEYFLSKEDMEEVAFALELSNVNFIWVARFPKGEERNLEDALPKGFLERIGERGRVLDKSAPQPRILNHPSTGGFISHCGWNSAMESIDFGVPIIAMPIHNDQPINAKLMVELGVAVEIVRDDDGKIHRGEIAETLKSVVTGETGEILRAKVREISKNLKSIRDEEMDAVAEELIQLCRNSNKSK

SEQ ID NO: 71 - protein, 442 aa, Artificial Sequence
  engineered beta-1,2-glycosyltransferase encoded in plasmid pA30935
MATNLRVLMFPWLAYGHISPFLNIAKQLADRGFLIYLCSTRINLESIIKKIPEKYADSIHLIELQLPELPELPPHYHTTNGLPPHLNPTLHKALKMSKPNFSRILQNLKPDLLIYDVLQPWAEHVANEQNIPAGKLLTSCAAVFSYFFSFRKNPGVEFPFPAIHLPEVEKVKIREILAKEPEEGGRLDEGNKQMMLMCTSRTIEAKYIDYCTELCNWKVVPVGPPFQDLITNDADNKELIDWLGTKHENSTVFVSFGSEYFLSKEDMEEVAFALELSNVNFIWVARFPKGEERNLEDALPKGFLERIGERGRVLDKFAPGPRILNHPSTGGFISHCGWNSAMESIDFGVPIIAMPIHNDQPINAKLMVELGVAVEIVRDDDGKIHRGEIAETLKSVVTGETGEILRAKVREISKNLKSIRDEEMDAVAEELIQLCRNSNKSK

SEQ ID NO: 72 - protein, 442 aa, Artificial Sequence
  engineered beta-1,2-glycosyltransferase encoded in plasmid pA30936
MATNLRVLMFPWLAYGHISPFLNIAKQLADRGFLIYLCSTRINLESIIKKIPEKYADSIHLIELQLPELPELPPHYHTTNGLPPHLNPTLHKALKMSKPNFSRILQNLKPDLLIYDVLQPWAEHVANEQNIPAGKLLTSCAAVFSYFFSFRKNPGVEFPFPAIHLPEVEKVKIREILAKEPEEGGRLDEGNKQMMLMCTSRTIEAKYIDYCTELCNWKVVPVGPPFQDLITNDADNKELIDWLGTKHENSTVFVSFGSEYFLSKEDMEEVAFALELSNVNFIWVARFPKGEERNLEDALPKGFLERIGERGRVLDKFAPPPRILNHPSTGGFISHCGWNSAMESIDFGVPIIAMPIHNDQPINAKLMVELGVAVEIVRDDDGKIHRGEIAETLKSVVTGETGEILRAKVREISKNLKSIRDEEMDAVAEELIQLCRNSNKSK

SEQ ID NO: 73 - protein, 442 aa, Artificial Sequence
  engineered beta-1,2-glycosyltransferase encoded in plasmid pA30937
MATNLRVLMFPWLAYGHISPFLNIAKQLADRGFLIYLCSTRINLESIIKKIPEKYADSIHLIELQLPELPELPPHYHTTNGLPPHLNPTLHKALKMSKPNFSRILQNLKPDLLIYDVLQPWAEHVANEQNIPAGKLLTSCAAVFSYFFSFRKNPGVEFPFPAIHLPEVEKVKIREILAKEPEEGGRLDEGNKQMMLMCTSRTIEAKYIDYCTELCNWKVVPVGPPFQDLITNDADNKELIDWLGTKHENSTVFVSFGSEYFLSKEDMEEVAFALELSNVNFIWVARFPKGEERNLEDALPKGFLERIGERGRVLDKFAPAPRILNHPSTGGFISHCGWNSAMESIDFGVPIIAMPIHNDQPINAKLMVELGVAVEIVRDDDGKIHRGEIAETLKSVVTGETGEILRAKVREISKNLKSIRDEEMDAVAEELIQLCRNSNKSK

SEQ ID NO: 74 - protein, 442 aa, Artificial Sequence
  engineered beta-1,2-glycosyltransferase encoded in plasmid pA30938
MATNLRVLMFPWLAYGHISPFLNIAKQLADRGFLIYLCSTRINLESIIKKIPEKYADSIHLIELQLPELPELPPHYHTTNGLPPHLNPTLHKALKMSKPNFSRILQNLKPDLLIYDVLQPWAEHVANEQNIPAGKLLTSCAAVFSYFFSFRKNPGVEFPFPAIHLPEVEKVKIREILAKEPEEGGRLDEGNKQMMLMCTSRTIEAKYIDYCTELCNWKVVPVGPPFQDLITNDADNKELIDWLGTKHENSTVFVSFGSEYFLSKEDMEEVAFALELSNVNFIWVARFPKGEERNLEDALPKGFLERIGERGRVLDKFAPVPRILNHPSTGGFISHCGWNSAMESIDFGVPIIAMPIHNDQPINAKLMVELGVAVEIVRDDDGKIHRGEIAETLKSVVTGETGEILRAKVREISKNLKSIRDEEMDAVAEELIQLCRNSNKSK

SEQ ID NO: 75 - protein, 442 aa, Artificial Sequence
  engineered beta-1,2-glycosyltransferase encoded in plasmid pA30939
MATNLRVLMFPWLAYGHISPFLNIAKQLADRGFLIYLCSTRINLESIIKKIPEKYADSIHLIELQLPELPELPPHYHTTNGLPPHLNPTLHKALKMSKPNFSRILQNLKPDLLIYDVLQPWAEHVANEQNIPAGKLLTSCAAVFSYFFSFRKNPGVEFPFPAIHLPEVEKVKIREILAKEPEEGGRLDEGNKQMMLMCTSRTIEAKYIDYCTELCNWKVVPVGPPFQDLITNDADNKELIDWLGTKHENSTVFVSFGSEYFLSKEDMEEVAFALELSNVNFIWVARFPKGEERNLEDALPKGFLERIGERGRVLDKFAPLPRILNHPSTGGFISHCGWNSAMESIDFGVPIIAMPIHNDQPINAKLMVELGVAVEIVRDDDGKIHRGEIAETLKSVVTGETGEILRAKVREISKNLKSIRDEEMDAVAEELIQLCRNSNKSK

SEQ ID NO: 76 - protein, 442 aa, Artificial Sequence
  engineered beta-1,2-glycosyltransferase encoded in plasmid pA30940
MATNLRVLMFPWLAYGHISPFLNIAKQLADRGFLIYLCSTRINLESIIKKIPEKYADSIHLIELQLPELPELPPHYHTTNGLPPHLNPTLHKALKMSKPNFSRILQNLKPDLLIYDVLQPWAEHVANEQNIPAGKLLTSCAAVFSYFFSFRKNPGVEFPFPAIHLPEVEKVKIREILAKEPEEGGRLDEGNKQMMLMCTSRTIEAKYIDYCTELCNWKVVPVGPPFQDLITNDADNKELIDWLGTKHENSTVFVSFGSEYFLSKEDMEEVAFALELSNVNFIWVARFPKGEERNLEDALPKGFLERIGERGRVLDKFAPIPRILNHPSTGGFISHCGWNSAMESIDFGVPIIAMPIHNDQPINAKLMVELGVAVEIVRDDDGKIHRGEIAETLKSVVTGETGEILRAKVREISKNLKSIRDEEMDAVAEELIQLCRNSNKSK

SEQ ID NO: 77 - protein, 442 aa, Artificial Sequence
  engineered beta-1,2-glycosyltransferase encoded in plasmid pA30941
MATNLRVLMFPWLAYGHISPFLNIAKQLADRGFLIYLCSTRINLESIIKKIPEKYADSIHLIELQLPELPELPPHYHTTNGLPPHLNPTLHKALKMSKPNFSRILQNLKPDLLIYDVLQPWAEHVANEQNIPAGKLLTSCAAVFSYFFSFRKNPGVEFPFPAIHLPEVEKVKIREILAKEPEEGGRLDEGNKQMMLMCTSRTIEAKYIDYCTELCNWKVVPVGPPFQDLITNDADNKELIDWLGTKHENSTVFVSFGSEYFLSKEDMEEVAFALELSNVNFIWVARFPKGEERNLEDALPKGFLERIGERGRVLDKFAPMPRILNHPSTGGFISHCGWNSAMESIDFGVPIIAMPIHNDQPINAKLMVELGVAVEIVRDDDGKIHRGEIAETLKSVVTGETGEILRAKVREISKNLKSIRDEEMDAVAEELIQLCRNSNKSK

SEQ ID NO: 78 - protein, 442 aa, Artificial Sequence
  engineered beta-1,2-glycosyltransferase encoded in plasmid pA30942
MATNLRVLMFPWLAYGHISPFLNIAKQLADRGFLIYLCSTRINLESIIKKIPEKYADSIHLIELQLPELPELPPHYHTTNGLPPHLNPTLHKALKMSKPNFSRILQNLKPDLLIYDVLQPWAEHVANEQNIPAGKLLTSCAAVFSYFFSFRKNPGVEFPFPAIHLPEVEKVKIREILAKEPEEGGRLDEGNKQMMLMCTSRTIEAKYIDYCTELCNWKVVPVGPPFQDLITNDADNKELIDWLGTKHENSTVFVSFGSEYFLSKEDMEEVAFALELSNVNFIWVARFPKGEERNLEDALPKGFLERIGERGRVLDKFAPCPRILNHPSTGGFISHCGWNSAMESIDFGVPIIAMPIHNDQPINAKLMVELGVAVEIVRDDDGKIHRGEIAETLKSVVTGETGEILRAKVREISKNLKSIRDEEMDAVAEELIQLCRNSNKSK

SEQ ID NO: 79 - protein, 442 aa, Artificial Sequence
  engineered beta-1,2-glycosyltransferase encoded in plasmid pA30943
MATNLRVLMFPWLAYGHISPFLNIAKQLADRGFLIYLCSTRINLESIIKKIPEKYADSIHLIELQLPELPELPPHYHTTNGLPPHLNPTLHKALKMSKPNFSRILQNLKPDLLIYDVLQPWAEHVANEQNIPAGKLLTSCAAVFSYFFSFRKNPGVEFPFPAIHLPEVEKVKIREILAKEPEEGGRLDEGNKQMMLMCTSRTIEAKYIDYCTELCNWKVVPVGPPFQDLITNDADNKELIDWLGTKHENSTVFVSFGSEYFLSKEDMEEVAFALELSNVNFIWVARFPKGEERNLEDALPKGFLERIGERGRVLDKFAPFPRILNHPSTGGFISHCGWNSAMESIDFGVPIIAMPIHNDQPINAKLMVELGVAVEIVRDDDGKIHRGEIAETLKSVVTGETGEILRAKVREISKNLKSIRDEEMDAVAEELIQLCRNSNKSK

SEQ ID NO: 80 - protein, 442 aa, Artificial Sequence
  engineered beta-1,2-glycosyltransferase encoded in plasmid pA30944
MATNLRVLMFPWLAYGHISPFLNIAKQLADRGFLIYLCSTRINLESIIKKIPEKYADSIHLIELQLPELPELPPHYHTTNGLPPHLNPTLHKALKMSKPNFSRILQNLKPDLLIYDVLQPWAEHVANEQNIPAGKLLTSCAAVFSYFFSFRKNPGVEFPFPAIHLPEVEKVKIREILAKEPEEGGRLDEGNKQMMLMCTSRTIEAKYIDYCTELCNWKVVPVGPPFQDLITNDADNKELIDWLGTKHENSTVFVSFGSEYFLSKEDMEEVAFALELSNVNFIWVARFPKGEERNLEDALPKGFLERIGERGRVLDKFAPYPRILNHPSTGGFISHCGWNSAMESIDFGVPIIAMPIHNDQPINAKLMVELGVAVEIVRDDDGKIHRGEIAETLKSVVTGETGEILRAKVREISKNLKSIRDEEMDAVAEELIQLCRNSNKSK

SEQ ID NO: 81 - protein, 442 aa, Artificial Sequence
  engineered beta-1,2-glycosyltransferase encoded in plasmid pA30945
MATNLRVLMFPWLAYGHISPFLNIAKQLADRGFLIYLCSTRINLESIIKKIPEKYADSIHLIELQLPELPELPPHYHTTNGLPPHLNPTLHKALKMSKPNFSRILQNLKPDLLIYDVLQPWAEHVANEQNIPAGKLLTSCAAVFSYFFSFRKNPGVEFPFPAIHLPEVEKVKIREILAKEPEEGGRLDEGNKQMMLMCTSRTIEAKYIDYCTELCNWKVVPVGPPFQDLITNDADNKELIDWLGTKHENSTVFVSFGSEYFLSKEDMEEVAFALELSNVNFIWVARFPKGEERNLEDALPKGFLERIGERGRVLDKFAPWPRILNHPSTGGFISHCGWNSAMESIDFGVPIIAMPIHNDQPINAKLMVELGVAVEIVRDDDGKIHRGEIAETLKSVVTGETGEILRAKVREISKNLKSIRDEEMDAVAEELIQLCRNSNKSK

SEQ ID NO: 82 - protein, 442 aa, Artificial Sequence
  engineered beta-1,2-glycosyltransferase encoded in plasmid pA30946
MATNLRVLMFPWLAYGHISPFLNIAKQLADRGFLIYLCSTRINLESIIKKIPEKYADSIHLIELQLPELPELPPHYHTTNGLPPHLNPTLHKALKMSKPNFSRILQNLKPDLLIYDVLQPWAEHVANEQNIPAGKLLTSCAAVFSYFFSFRKNPGVEFPFPAIHLPEVEKVKIREILAKEPEEGGRLDEGNKQMMLMCTSRTIEAKYIDYCTELCNWKVVPVGPPFQDLITNDADNKELIDWLGTKHENSTVFVSFGSEYFLSKEDMEEVAFALELSNVNFIWVARFPKGEERNLEDALPKGFLERIGERGRVLDKFAPHPRILNHPSTGGFISHCGWNSAMESIDFGVPIIAMPIHNDQPINAKLMVELGVAVEIVRDDDGKIHRGEIAETLKSVVTGETGEILRAKVREISKNLKSIRDEEMDAVAEELIQLCRNSNKSK

SEQ ID NO: 83 - protein, 442 aa, Artificial Sequence
  engineered beta-1,2-glycosyltransferase encoded in plasmid pA30947
MATNLRVLMFPWLAYGHISPFLNIAKQLADRGFLIYLCSTRINLESIIKKIPEKYADSIHLIELQLPELPELPPHYHTTNGLPPHLNPTLHKALKMSKPNFSRILQNLKPDLLIYDVLQPWAEHVANEQNIPAGKLLTSCAAVFSYFFSFRKNPGVEFPFPAIHLPEVEKVKIREILAKEPEEGGRLDEGNKQMMLMCTSRTIEAKYIDYCTELCNWKVVPVGPPFQDLITNDADNKELIDWLGTKHENSTVFVSFGSEYFLSKEDMEEVAFALELSNVNFIWVARFPKGEERNLEDALPKGFLERIGERGRVLDKFAPKPRILNHPSTGGFISHCGWNSAMESIDFGVPIIAMPIHNDQPINAKLMVELGVAVEIVRDDDGKIHRGEIAETLKSVVTGETGEILRAKVREISKNLKSIRDEEMDAVAEELIQLCRNSNKSK

SEQ ID NO: 84 - protein, 442 aa, Artificial Sequence
  engineered beta-1,2-glycosyltransferase encoded in plasmid pA30948
MATNLRVLMFPWLAYGHISPFLNIAKQLADRGFLIYLCSTRINLESIIKKIPEKYADSIHLIELQLPELPELPPHYHTTNGLPPHLNPTLHKALKMSKPNFSRILQNLKPDLLIYDVLQPWAEHVANEQNIPAGKLLTSCAAVFSYFFSFRKNPGVEFPFPAIHLPEVEKVKIREILAKEPEEGGRLDEGNKQMMLMCTSRTIEAKYIDYCTELCNWKVVPVGPPFQDLITNDADNKELIDWLGTKHENSTVFVSFGSEYFLSKEDMEEVAFALELSNVNFIWVARFPKGEERNLEDALPKGFLERIGERGRVLDKFAPRPRILNHPSTGGFISHCGWNSAMESIDFGVPIIAMPIHNDQPINAKLMVELGVAVEIVRDDDGKIHRGEIAETLKSVVTGETGEILRAKVREISKNLKSIRDEEMDAVAEELIQLCRNSNKSK

SEQ ID NO: 85 - protein, 442 aa, Artificial Sequence
  engineered beta-1,2-glycosyltransferase encoded in plasmid pA30949
MATNLRVLMFPWLAYGHISPFLNIAKQLADRGFLIYLCSTRINLESIIKKIPEKYADSIHLIELQLPELPELPPHYHTTNGLPPHLNPTLHKALKMSKPNFSRILQNLKPDLLIYDVLQPWAEHVANEQNIPAGKLLTSCAAVFSYFFSFRKNPGVEFPFPAIHLPEVEKVKIREILAKEPEEGGRLDEGNKQMMLMCTSRTIEAKYIDYCTELCNWKVVPVGPPFQDLITNDADNKELIDWLGTKHENSTVFVSFGSEYFLSKEDMEEVAFALELSNVNFIWVARFPKGEERNLEDALPKGFLERIGERGRVLDKFAPNPRILNHPSTGGFISHCGWNSAMESIDFGVPIIAMPIHNDQPINAKLMVELGVAVEIVRDDDGKIHRGEIAETLKSVVTGETGEILRAKVREISKNLKSIRDEEMDAVAEELIQLCRNSNKSK

SEQ ID NO: 86 - protein, 442 aa, Artificial Sequence
  engineered beta-1,2-glycosyltransferase encoded in plasmid pA30951
MATNLRVLMFPWLAYGHISPFLNIAKQLADRGFLIYLCSTRINLESIIKKIPEKYADSIHLIELQLPELPELPPHYHTTNGLPPHLNPTLHKALKMSKPNFSRILQNLKPDLLIYDVLQPWAEHVANEQNIPAGKLLTSCAAVFSYFFSFRKNPGVEFPFPAIHLPEVEKVKIREILAKEPEEGGRLDEGNKQMMLMCTSRTIEAKYIDYCTELCNWKVVPVGPPFQDLITNDADNKELIDWLGTKHENSTVFVSFGSEYFLSKEDMEEVAFALELSNVNFIWVARFPKGEERNLEDALPKGFLERIGERGRVLDKFAPDPRILNHPSTGGFISHCGWNSAMESIDFGVPIIAMPIHNDQPINAKLMVELGVAVEIVRDDDGKIHRGEIAETLKSVVTGETGEILRAKVREISKNLKSIRDEEMDAVAEELIQLCRNSNKSK

SEQ ID NO: 87 - protein, 442 aa, Artificial Sequence
  engineered beta-1,2-glycosyltransferase encoded in plasmid pA30952
MATNLRVLMFPWLAYGHISPFLNIAKQLADRGFLIYLCSTRINLESIIKKIPEKYADSIHLIELQLPELPELPPHYHTTNGLPPHLNPTLHKALKMSKPNFSRILQNLKPDLLIYDVLQPWAEHVANEQNIPAGKLLTSCAAVFSYFFSFRKNPGVEFPFPAIHLPEVEKVKIREILAKEPEEGGRLDEGNKQMMLMCTSRTIEAKYIDYCTELCNWKVVPVGPPFQDLITNDADNKELIDWLGTKHENSTVFVSFGSEYFLSKEDMEEVAFALELSNVNFIWVARFPKGEERNLEDALPKGFLERIGERGRVLDKFAPSPRILNHPSTGGFISHCGWNSAMESIDFGVPIIAMPIHNDQPINAKLMVELGVAVEIVRDDDGKIHRGEIAETLKSVVTGETGEILRAKVREISKNLKSIRDEEMDAVAEELIQLCRNSNKSK

SEQ ID NO: 88 - protein, 442 aa, Artificial Sequence
  engineered beta-1,2-glycosyltransferase encoded in plasmid pA30953
MATNLRVLMFPWLAYGHISPFLNIAKQLADRGFLIYLCSTRINLESIIKKIPEKYADSIHLIELQLPELPELPPHYHTTNGLPPHLNPTLHKALKMSKPNFSRILQNLKPDLLIYDVLQPWAEHVANEQNIPAGKLLTSCAAVFSYFFSFRKNPGVEFPFPAIHLPEVEKVKIREILAKEPEEGGRLDEGNKQMMLMCTSRTIEAKYIDYCTELCNWKVVPVGPPFQDLITNDADNKELIDWLGTKHENSTVFVSFGSEYFLSKEDMEEVAFALELSNVNFIWVARFPKGEERNLEDALPKGFLERIGERGRVLDKFAPTPRILNHPSTGGFISHCGWNSAMESIDFGVPIIAMPIHNDQPINAKLMVELGVAVEIVRDDDGKIHRGEIAETLKSVVTGETGEILRAKVREISKNLKSIRDEEMDAVAEELIQLCRNSNKSK

SEQ ID NO: 89 - protein, 442 aa, Artificial Sequence
  engineered beta-1,2-glycosyltransferase encoded in plasmid pA30997
MATNLRVLMFPWLAYGHISPFLNIAKQLADRGFLIYLCSTRINLESIIKKIPEKYADSIHLIELQLPELPELPPHYHTTNGLPPHLNPTLHKALKMSKPNFSRILQNLKPDLLIYDVLQPWAEHVANEQNIPAGKLLTSCAAVFSYFFSFRKNPGVEFPFPAIHLPEVEKVKIREILAKEPEEGGRLDEGNKQMMLMCTSRTIEAKYIDYCTELCNWKVVPVGPPFQDLITNDADNKELIDWLGTKHENSTVFVSFGSEYFLSKEDMEEVAFALELSNVNFIWVARFPKGEERNLEDALPKGFLERIGERGRVLDKFAPQPRIMNHPSTGGFISHCGWNSAMESIDFGVPIIAMPIHNDQPINAKLMVELGVAVEIVRDDDGKIHRGEIAETLKSVVTGETGEILRAKVREISKNLKSIRDEEMDAVAEELIQLCRNSNKSK

SEQ ID NO: 90 - protein, 442 aa, Artificial Sequence
  engineered beta-1,2-glycosyltransferase encoded in plasmid pA30998
MATNLRVLMFPWLAYGHISPFLNIAKQLADRGFLIYLCSTRINLESIIKKIPEKYADSIHLIELQLPELPELPPHYHTTNGLPPHLNPTLHKALKMSKPNFSRILQNLKPDLLIYDVLQPWAEHVANEQNIPAGKLLTSCAAVFSYFFSFRKNPGVEFPFPAIHLPEVEKVKIREILAKEPEEGGRLDEGNKQMMLMCTSRTIEAKYIDYCTELCNWKVVPVGPPFQDLITNDADNKELIDWLGTKHENSTVFVSFGSEYFLSKEDMEEVAFALELSNVNFIWVARFPKGEERNLEDALPKGFLERIGERGRVLDKFAPQPRICNHPSTGGFISHCGWNSAMESIDFGVPIIAMPIHNDQPINAKLMVELGVAVEIVRDDDGKIHRGEIAETLKSVVTGETGEILRAKVREISKNLKSIRDEEMDAVAEELIQLCRNSNKSK

SEQ ID NO: 91 - protein, 442 aa, Artificial Sequence
  engineered beta-1,2-glycosyltransferase encoded in plasmid pA31001
MATNLRVLMFPWLAYGHISPFLNIAKQLADRGFLIYLCSTRINLESIIKKIPEKYADSIHLIELQLPELPELPPHYHTTNGLPPHLNPTLHKALKMSKPNFSRILQNLKPDLLIYDVLQPWAEHVANEQNIPAGKLLTSCAAVFSYFFSFRKNPGVEFPFPAIHLPEVEKVKIREILAKEPEEGGRLDEGNKQMMLMCTSRTIEAKYIDYCTELCNWKVVPVGPPFQDLITNDADNKELIDWLGTKHENSTVFVSFGSEYFLSKEDMEEVAFALELSNVNFIWVARFPKGEERNLEDALPKGFLERIGERGRVLDKFAPQPRIWNHPSTGGFISHCGWNSAMESIDFGVPIIAMPIHNDQPINAKLMVELGVAVEIVRDDDGKIHRGEIAETLKSVVTGETGEILRAKVREISKNLKSIRDEEMDAVAEELIQLCRNSNKSK

SEQ ID NO: 92 - protein, 442 aa, Artificial Sequence
  engineered beta-1,2-glycosyltransferase encoded in plasmid pA31003
MATNLRVLMFPWLAYGHISPFLNIAKQLADRGFLIYLCSTRINLESIIKKIPEKYADSIHLIELQLPELPELPPHYHTTNGLPPHLNPTLHKALKMSKPNFSRILQNLKPDLLIYDVLQPWAEHVANEQNIPAGKLLTSCAAVFSYFFSFRKNPGVEFPFPAIHLPEVEKVKIREILAKEPEEGGRLDEGNKQMMLMCTSRTIEAKYIDYCTELCNWKVVPVGPPFQDLITNDADNKELIDWLGTKHENSTVFVSFGSEYFLSKEDMEEVAFALELSNVNFIWVARFPKGEERNLEDALPKGFLERIGERGRVLDKFAPQPRIKNHPSTGGFISHCGWNSAMESIDFGVPIIAMPIHNDQPINAKLMVELGVAVEIVRDDDGKIHRGEIAETLKSVVTGETGEILRAKVREISKNLKSIRDEEMDAVAEELIQLCRNSNKSK

SEQ ID NO: 93 - protein, 442 aa, Artificial Sequence
  engineered beta-1,2-glycosyltransferase encoded in plasmid pA31004
MATNLRVLMFPWLAYGHISPFLNIAKQLADRGFLIYLCSTRINLESIIKKIPEKYADSIHLIELQLPELPELPPHYHTTNGLPPHLNPTLHKALKMSKPNFSRILQNLKPDLLIYDVLQPWAEHVANEQNIPAGKLLTSCAAVFSYFFSFRKNPGVEFPFPAIHLPEVEKVKIREILAKEPEEGGRLDEGNKQMMLMCTSRTIEAKYIDYCTELCNWKVVPVGPPFQDLITNDADNKELIDWLGTKHENSTVFVSFGSEYFLSKEDMEEVAFALELSNVNFIWVARFPKGEERNLEDALPKGFLERIGERGRVLDKFAPQPRIRNHPSTGGFISHCGWNSAMESIDFGVPIIAMPIHNDQPINAKLMVELGVAVEIVRDDDGKIHRGEIAETLKSVVTGETGEILRAKVREISKNLKSIRDEEMDAVAEELIQLCRNSNKSK

SEQ ID NO: 94 - protein, 442 aa, Artificial Sequence
  engineered beta-1,2-glycosyltransferase encoded in plasmid pA31005
MATNLRVLMFPWLAYGHISPFLNIAKQLADRGFLIYLCSTRINLESIIKKIPEKYADSIHLIELQLPELPELPPHYHTTNGLPPHLNPTLHKALKMSKPNFSRILQNLKPDLLIYDVLQPWAEHVANEQNIPAGKLLTSCAAVFSYFFSFRKNPGVEFPFPAIHLPEVEKVKIREILAKEPEEGGRLDEGNKQMMLMCTSRTIEAKYIDYCTELCNWKVVPVGPPFQDLITNDADNKELIDWLGTKHENSTVFVSFGSEYFLSKEDMEEVAFALELSNVNFIWVARFPKGEERNLEDALPKGFLERIGERGRVLDKFAPQPRIQNHPSTGGFISHCGWNSAMESIDFGVPIIAMPIHNDQPINAKLMVELGVAVEIVRDDDGKIHRGEIAETLKSVVTGETGEILRAKVREISKNLKSIRDEEMDAVAEELIQLCRNSNKSK

SEQ ID NO: 95 - protein, 442 aa, Artificial Sequence
  engineered beta-1,2-glycosyltransferase encoded in plasmid pA31006
MATNLRVLMFPWLAYGHISPFLNIAKQLADRGFLIYLCSTRINLESIIKKIPEKYADSIHLIELQLPELPELPPHYHTTNGLPPHLNPTLHKALKMSKPNFSRILQNLKPDLLIYDVLQPWAEHVANEQNIPAGKLLTSCAAVFSYFFSFRKNPGVEFPFPAIHLPEVEKVKIREILAKEPEEGGRLDEGNKQMMLMCTSRTIEAKYIDYCTELCNWKVVPVGPPFQDLITNDADNKELIDWLGTKHENSTVFVSFGSEYFLSKEDMEEVAFALELSNVNFIWVARFPKGEERNLEDALPKGFLERIGERGRVLDKFAPQPRINNHPSTGGFISHCGWNSAMESIDFGVPIIAMPIHNDQPINAKLMVELGVAVEIVRDDDGKIHRGEIAETLKSVVTGETGEILRAKVREISKNLKSIRDEEMDAVAEELIQLCRNSNKSK

SEQ ID NO: 96 - protein, 442 aa, Artificial Sequence
  engineered beta-1,2-glycosyltransferase encoded in plasmid pA31009
MATNLRVLMFPWLAYGHISPFLNIAKQLADRGFLIYLCSTRINLESIIKKIPEKYADSIHLIELQLPELPELPPHYHTTNGLPPHLNPTLHKALKMSKPNFSRILQNLKPDLLIYDVLQPWAEHVANEQNIPAGKLLTSCAAVFSYFFSFRKNPGVEFPFPAIHLPEVEKVKIREILAKEPEEGGRLDEGNKQMMLMCTSRTIEAKYIDYCTELCNWKVVPVGPPFQDLITNDADNKELIDWLGTKHENSTVFVSFGSEYFLSKEDMEEVAFALELSNVNFIWVARFPKGEERNLEDALPKGFLERIGERGRVLDKFAPQPRISNHPSTGGFISHCGWNSAMESIDFGVPIIAMPIHNDQPINAKLMVELGVAVEIVRDDDGKIHRGEIAETLKSVVTGETGEILRAKVREISKNLKSIRDEEMDAVAEELIQLCRNSNKSK

SEQ ID NO: 97 - protein, 442 aa, Artificial Sequence
  engineered beta-1,2-glycosyltransferase encoded in plasmid pA31011
MATNLRVLMFPWLAYGHISPFLNIAKQLADRGFLIYLCSTRINLESIIKKIPEKYADSIHLIELQLPELPELPPHYHTTNGLPPHLNPTLHKALKMSKPNFSRILQNLKPDLLIYDVLQPWAEHVANEQNIPAGKLLTSCAAVFSYFFSFRKNPGVEFPFPAIHLPEVEKVKIREILAKEPEEGGRLDEGNKQMMLMCTSRTIEAKYIDYCTELCNWKVVPVGPPFQDLITNDADNKELIDWLGTKHENSTVFVSFGSEYFLSKEDMEEVAFALELSNVNFIWVARFPKGEERNLEDALPKGFLERIGERGRVLDKFAPQPRILNHPSTGGGISHCGWNSAMESIDFGVPIIAMPIHNDQPINAKLMVELGVAVEIVRDDDGKIHRGEIAETLKSVVTGETGEILRAKVREISKNLKSIRDEEMDAVAEELIQLCRNSNKSK

SEQ ID NO: 98 - protein, 442 aa, Artificial Sequence
  engineered beta-1,2-glycosyltransferase encoded in plasmid pA31012
MATNLRVLMFPWLAYGHISPFLNIAKQLADRGFLIYLCSTRINLESIIKKIPEKYADSIHLIELQLPELPELPPHYHTTNGLPPHLNPTLHKALKMSKPNFSRILQNLKPDLLIYDVLQPWAEHVANEQNIPAGKLLTSCAAVFSYFFSFRKNPGVEFPFPAIHLPEVEKVKIREILAKEPEEGGRLDEGNKQMMLMCTSRTIEAKYIDYCTELCNWKVVPVGPPFQDLITNDADNKELIDWLGTKHENSTVFVSFGSEYFLSKEDMEEVAFALELSNVNFIWVARFPKGEERNLEDALPKGFLERIGERGRVLDKFAPQPRILNHPSTGGPISHCGWNSAMESIDFGVPIIAMPIHNDQPINAKLMVELGVAVEIVRDDDGKIHRGEIAETLKSVVTGETGEILRAKVREISKNLKSIRDEEMDAVAEELIQLCRNSNKSK

SEQ ID NO: 99 - protein, 442 aa, Artificial Sequence
  engineered beta-1,2-glycosyltransferase encoded in plasmid pA31014
MATNLRVLMFPWLAYGHISPFLNIAKQLADRGFLIYLCSTRINLESIIKKIPEKYADSIHLIELQLPELPELPPHYHTTNGLPPHLNPTLHKALKMSKPNFSRILQNLKPDLLIYDVLQPWAEHVANEQNIPAGKLLTSCAAVFSYFFSFRKNPGVEFPFPAIHLPEVEKVKIREILAKEPEEGGRLDEGNKQMMLMCTSRTIEAKYIDYCTELCNWKVVPVGPPFQDLITNDADNKELIDWLGTKHENSTVFVSFGSEYFLSKEDMEEVAFALELSNVNFIWVARFPKGEERNLEDALPKGFLERIGERGRVLDKFAPQPRILNHPSTGGVISHCGWNSAMESIDFGVPIIAMPIHNDQPINAKLMVELGVAVEIVRDDDGKIHRGEIAETLKSVVTGETGEILRAKVREISKNLKSIRDEEMDAVAEELIQLCRNSNKSK

SEQ ID NO: 100 - protein, 442 aa, Artificial Sequence
  engineered beta-1,2-glycosyltransferase encoded in plasmid pA31016
MATNLRVLMFPWLAYGHISPFLNIAKQLADRGFLIYLCSTRINLESIIKKIPEKYADSIHLIELQLPELPELPPHYHTTNGLPPHLNPTLHKALKMSKPNFSRILQNLKPDLLIYDVLQPWAEHVANEQNIPAGKLLTSCAAVFSYFFSFRKNPGVEFPFPAIHLPEVEKVKIREILAKEPEEGGRLDEGNKQMMLMCTSRTIEAKYIDYCTELCNWKVVPVGPPFQDLITNDADNKELIDWLGTKHENSTVFVSFGSEYFLSKEDMEEVAFALELSNVNFIWVARFPKGEERNLEDALPKGFLERIGERGRVLDKFAPQPRILNHPSTGGIISHCGWNSAMESIDFGVPIIAMPIHNDQPINAKLMVELGVAVEIVRDDDGKIHRGEIAETLKSVVTGETGEILRAKVREISKNLKSIRDEEMDAVAEELIQLCRNSNKSK

SEQ ID NO: 101 - protein, 442 aa, Artificial Sequence
  engineered beta-1,2-glycosyltransferase encoded in plasmid pA31017
MATNLRVLMFPWLAYGHISPFLNIAKQLADRGFLIYLCSTRINLESIIKKIPEKYADSIHLIELQLPELPELPPHYHTTNGLPPHLNPTLHKALKMSKPNFSRILQNLKPDLLIYDVLQPWAEHVANEQNIPAGKLLTSCAAVFSYFFSFRKNPGVEFPFPAIHLPEVEKVKIREILAKEPEEGGRLDEGNKQMMLMCTSRTIEAKYIDYCTELCNWKVVPVGPPFQDLITNDADNKELIDWLGTKHENSTVFVSFGSEYFLSKEDMEEVAFALELSNVNFIWVARFPKGEERNLEDALPKGFLERIGERGRVLDKFAPQPRILNHPSTGGMISHCGWNSAMESIDFGVPIIAMPIHNDQPINAKLMVELGVAVEIVRDDDGKIHRGEIAETLKSVVTGETGEILRAKVREISKNLKSIRDEEMDAVAEELIQLCRNSNKSK

SEQ ID NO: 102 - protein, 442 aa, Artificial Sequence
  engineered beta-1,2-glycosyltransferase encoded in plasmid pA31018
MATNLRVLMFPWLAYGHISPFLNIAKQLADRGFLIYLCSTRINLESIIKKIPEKYADSIHLIELQLPELPELPPHYHTTNGLPPHLNPTLHKALKMSKPNFSRILQNLKPDLLIYDVLQPWAEHVANEQNIPAGKLLTSCAAVFSYFFSFRKNPGVEFPFPAIHLPEVEKVKIREILAKEPEEGGRLDEGNKQMMLMCTSRTIEAKYIDYCTELCNWKVVPVGPPFQDLITNDADNKELIDWLGTKHENSTVFVSFGSEYFLSKEDMEEVAFALELSNVNFIWVARFPKGEERNLEDALPKGFLERIGERGRVLDKFAPQPRILNHPSTGGCISHCGWNSAMESIDFGVPIIAMPIHNDQPINAKLMVELGVAVEIVRDDDGKIHRGEIAETLKSVVTGETGEILRAKVREISKNLKSIRDEEMDAVAEELIQLCRNSNKSK

SEQ ID NO: 103 - protein, 442 aa, Artificial Sequence
  engineered beta-1,2-glycosyltransferase encoded in plasmid pA31020
MATNLRVLMFPWLAYGHISPFLNIAKQLADRGFLIYLCSTRINLESIIKKIPEKYADSIHLIELQLPELPELPPHYHTTNGLPPHLNPTLHKALKMSKPNFSRILQNLKPDLLIYDVLQPWAEHVANEQNIPAGKLLTSCAAVFSYFFSFRKNPGVEFPFPAIHLPEVEKVKIREILAKEPEEGGRLDEGNKQMMLMCTSRTIEAKYIDYCTELCNWKVVPVGPPFQDLITNDADNKELIDWLGTKHENSTVFVSFGSEYFLSKEDMEEVAFALELSNVNFIWVARFPKGEERNLEDALPKGFLERIGERGRVLDKFAPQPRILNHPSTGGWISHCGWNSAMESIDFGVPIIAMPIHNDQPINAKLMVELGVAVEIVRDDDGKIHRGEIAETLKSVVTGETGEILRAKVREISKNLKSIRDEEMDAVAEELIQLCRNSNKSK

SEQ ID NO: 104 - protein, 442 aa, Artificial Sequence
  engineered beta-1,2-glycosyltransferase encoded in plasmid pA31022
MATNLRVLMFPWLAYGHISPFLNIAKQLADRGFLIYLCSTRINLESIIKKIPEKYADSIHLIELQLPELPELPPHYHTTNGLPPHLNPTLHKALKMSKPNFSRILQNLKPDLLIYDVLQPWAEHVANEQNIPAGKLLTSCAAVFSYFFSFRKNPGVEFPFPAIHLPEVEKVKIREILAKEPEEGGRLDEGNKQMMLMCTSRTIEAKYIDYCTELCNWKVVPVGPPFQDLITNDADNKELIDWLGTKHENSTVFVSFGSEYFLSKEDMEEVAFALELSNVNFIWVARFPKGEERNLEDALPKGFLERIGERGRVLDKFAPQPRILNHPSTGGKISHCGWNSAMESIDFGVPIIAMPIHNDQPINAKLMVELGVAVEIVRDDDGKIHRGEIAETLKSVVTGETGEILRAKVREISKNLKSIRDEEMDAVAEELIQLCRNSNKSK

SEQ ID NO: 105 - protein, 442 aa, Artificial Sequence
  engineered beta-1,2-glycosyltransferase encoded in plasmid pA31024
MATNLRVLMFPWLAYGHISPFLNIAKQLADRGFLIYLCSTRINLESIIKKIPEKYADSIHLIELQLPELPELPPHYHTTNGLPPHLNPTLHKALKMSKPNFSRILQNLKPDLLIYDVLQPWAEHVANEQNIPAGKLLTSCAAVFSYFFSFRKNPGVEFPFPAIHLPEVEKVKIREILAKEPEEGGRLDEGNKQMMLMCTSRTIEAKYIDYCTELCNWKVVPVGPPFQDLITNDADNKELIDWLGTKHENSTVFVSFGSEYFLSKEDMEEVAFALELSNVNFIWVARFPKGEERNLEDALPKGFLERIGERGRVLDKFAPQPRILNHPSTGGQISHCGWNSAMESIDFGVPIIAMPIHNDQPINAKLMVELGVAVEIVRDDDGKIHRGEIAETLKSVVTGETGEILRAKVREISKNLKSIRDEEMDAVAEELIQLCRNSNKSK

SEQ ID NO: 106 - protein, 442 aa, Artificial Sequence
  engineered beta-1,2-glycosyltransferase encoded in plasmid pA31026
MATNLRVLMFPWLAYGHISPFLNIAKQLADRGFLIYLCSTRINLESIIKKIPEKYADSIHLIELQLPELPELPPHYHTTNGLPPHLNPTLHKALKMSKPNFSRILQNLKPDLLIYDVLQPWAEHVANEQNIPAGKLLTSCAAVFSYFFSFRKNPGVEFPFPAIHLPEVEKVKIREILAKEPEEGGRLDEGNKQMMLMCTSRTIEAKYIDYCTELCNWKVVPVGPPFQDLITNDADNKELIDWLGTKHENSTVFVSFGSEYFLSKEDMEEVAFALELSNVNFIWVARFPKGEERNLEDALPKGFLERIGERGRVLDKFAPQPRILNHPSTGGEISHCGWNSAMESIDFGVPIIAMPIHNDQPINAKLMVELGVAVEIVRDDDGKIHRGEIAETLKSVVTGETGEILRAKVREISKNLKSIRDEEMDAVAEELIQLCRNSNKSK

SEQ ID NO: 107 - protein, 442 aa, Artificial Sequence
  engineered beta-1,2-glycosyltransferase encoded in plasmid pA31029
MATNLRVLMFPWLAYGHISPFLNIAKQLADRGFLIYLCSTRINLESIIKKIPEKYADSIHLIELQLPELPELPPHYHTTNGLPPHLNPTLHKALKMSKPNFSRILQNLKPDLLIYDVLQPWAEHVANEQNIPAGKLLTSCAAVFSYFFSFRKNPGVEFPFPAIHLPEVEKVKIREILAKEPEEGGRLDEGNKQMMLMCTSRTIEAKYIDYCTELCNWKVVPVGPPFQDLITNDADNKELIDWLGTKHENSTVFVSFGSEYFLSKEDMEEVAFALELSNVNFIWVARFPKGEERNLEDALPKGFLERIGERGRVLDKFAPQPRILNHPSTGGTISHCGWNSAMESIDFGVPIIAMPIHNDQPINAKLMVELGVAVEIVRDDDGKIHRGEIAETLKSVVTGETGEILRAKVREISKNLKSIRDEEMDAVAEELIQLCRNSNKSK

SEQ ID NO: 108 - protein, 442 aa, Artificial Sequence
  engineered beta-1,2-glycosyltransferase encoded in plasmid pA31068
MATNLRVLMFPWLAYGHISPFLNIAKQLADRGFLIYLCSTRINLESIIKKIPEKYADSIHLIELQLPELPELPPHYHTTNGLPPHLNPTLHKALKMSKPNFSRILQNLKPDLLIYDVLQPWAEHVANEQNIPAGKLLTSCAAVFSYFFSFRKNPGVEFPFPAIHLPEVEKVKIREILAKEPEEGGRLDEGNKQMMLMCTSRTIEAKYIDYCTELCNWKVVPVGPPFQDLITNDADNKELIDWLGTKHENSTVFVSFGSEYFLSKEDMEEVAFALELSNVNFIWVARFPKGEERNLEDALPKGFLERIGERGRVLDKFAPQPRILNHPSTGGFISHGGWNSAMESIDFGVPIIAMPIHNDQPINAKLMVELGVAVEIVRDDDGKIHRGEIAETLKSVVTGETGEILRAKVREISKNLKSIRDEEMDAVAEELIQLCRNSNKSK

SEQ ID NO: 109 - protein, 442 aa, Artificial Sequence
  engineered beta-1,2-glycosyltransferase encoded in plasmid pA31069
MATNLRVLMFPWLAYGHISPFLNIAKQLADRGFLIYLCSTRINLESIIKKIPEKYADSIHLIELQLPELPELPPHYHTTNGLPPHLNPTLHKALKMSKPNFSRILQNLKPDLLIYDVLQPWAEHVANEQNIPAGKLLTSCAAVFSYFFSFRKNPGVEFPFPAIHLPEVEKVKIREILAKEPEEGGRLDEGNKQMMLMCTSRTIEAKYIDYCTELCNWKVVPVGPPFQDLITNDADNKELIDWLGTKHENSTVFVSFGSEYFLSKEDMEEVAFALELSNVNFIWVARFPKGEERNLEDALPKGFLERIGERGRVLDKFAPQPRILNHPSTGGFISHPGWNSAMESIDFGVPIIAMPIHNDQPINAKLMVELGVAVEIVRDDDGKIHRGEIAETLKSVVTGETGEILRAKVREISKNLKSIRDEEMDAVAEELIQLCRNSNKSK

SEQ ID NO: 110 - protein, 442 aa, Artificial Sequence
  engineered beta-1,2-glycosyltransferase encoded in plasmid pA31070
MATNLRVLMFPWLAYGHISPFLNIAKQLADRGFLIYLCSTRINLESIIKKIPEKYADSIHLIELQLPELPELPPHYHTTNGLPPHLNPTLHKALKMSKPNFSRILQNLKPDLLIYDVLQPWAEHVANEQNIPAGKLLTSCAAVFSYFFSFRKNPGVEFPFPAIHLPEVEKVKIREILAKEPEEGGRLDEGNKQMMLMCTSRTIEAKYIDYCTELCNWKVVPVGPPFQDLITNDADNKELIDWLGTKHENSTVFVSFGSEYFLSKEDMEEVAFALELSNVNFIWVARFPKGEERNLEDALPKGFLERIGERGRVLDKFAPQPRILNHPSTGGFISHAGWNSAMESIDFGVPIIAMPIHNDQPINAKLMVELGVAVEIVRDDDGKIHRGEIAETLKSVVTGETGEILRAKVREISKNLKSIRDEEMDAVAEELIQLCRNSNKSK

SEQ ID NO: 111 - protein, 442 aa, Artificial Sequence
  engineered beta-1,2-glycosyltransferase encoded in plasmid pA31071
MATNLRVLMFPWLAYGHISPFLNIAKQLADRGFLIYLCSTRINLESIIKKIPEKYADSIHLIELQLPELPELPPHYHTTNGLPPHLNPTLHKALKMSKPNFSRILQNLKPDLLIYDVLQPWAEHVANEQNIPAGKLLTSCAAVFSYFFSFRKNPGVEFPFPAIHLPEVEKVKIREILAKEPEEGGRLDEGNKQMMLMCTSRTIEAKYIDYCTELCNWKVVPVGPPFQDLITNDADNKELIDWLGTKHENSTVFVSFGSEYFLSKEDMEEVAFALELSNVNFIWVARFPKGEERNLEDALPKGFLERIGERGRVLDKFAPQPRILNHPSTGGFISHVGWNSAMESIDFGVPIIAMPIHNDQPINAKLMVELGVAVEIVRDDDGKIHRGEIAETLKSVVTGETGEILRAKVREISKNLKSIRDEEMDAVAEELIQLCRNSNKSK

SEQ ID NO: 112 - protein, 442 aa, Artificial Sequence
  engineered beta-1,2-glycosyltransferase encoded in plasmid pA31073
MATNLRVLMFPWLAYGHISPFLNIAKQLADRGFLIYLCSTRINLESIIKKIPEKYADSIHLIELQLPELPELPPHYHTTNGLPPHLNPTLHKALKMSKPNFSRILQNLKPDLLIYDVLQPWAEHVANEQNIPAGKLLTSCAAVFSYFFSFRKNPGVEFPFPAIHLPEVEKVKIREILAKEPEEGGRLDEGNKQMMLMCTSRTIEAKYIDYCTELCNWKVVPVGPPFQDLITNDADNKELIDWLGTKHENSTVFVSFGSEYFLSKEDMEEVAFALELSNVNFIWVARFPKGEERNLEDALPKGFLERIGERGRVLDKFAPQPRILNHPSTGGFISHIGWNSAMESIDFGVPIIAMPIHNDQPINAKLMVELGVAVEIVRDDDGKIHRGEIAETLKSVVTGETGEILRAKVREISKNLKSIRDEEMDAVAEELIQLCRNSNKSK

SEQ ID NO: 113 - protein, 442 aa, Artificial Sequence
  engineered beta-1,2-glycosyltransferase encoded in plasmid pA31074
MATNLRVLMFPWLAYGHISPFLNIAKQLADRGFLIYLCSTRINLESIIKKIPEKYADSIHLIELQLPELPELPPHYHTTNGLPPHLNPTLHKALKMSKPNFSRILQNLKPDLLIYDVLQPWAEHVANEQNIPAGKLLTSCAAVFSYFFSFRKNPGVEFPFPAIHLPEVEKVKIREILAKEPEEGGRLDEGNKQMMLMCTSRTIEAKYIDYCTELCNWKVVPVGPPFQDLITNDADNKELIDWLGTKHENSTVFVSFGSEYFLSKEDMEEVAFALELSNVNFIWVARFPKGEERNLEDALPKGFLERIGERGRVLDKFAPQPRILNHPSTGGFISHMGWNSAMESIDFGVPIIAMPIHNDQPINAKLMVELGVAVEIVRDDDGKIHRGEIAETLKSVVTGETGEILRAKVREISKNLKSIRDEEMDAVAEELIQLCRNSNKSK

SEQ ID NO: 114 - protein, 442 aa, Artificial Sequence
  engineered beta-1,2-glycosyltransferase encoded in plasmid pA31075
MATNLRVLMFPWLAYGHISPFLNIAKQLADRGFLIYLCSTRINLESIIKKIPEKYADSIHLIELQLPELPELPPHYHTTNGLPPHLNPTLHKALKMSKPNFSRILQNLKPDLLIYDVLQPWAEHVANEQNIPAGKLLTSCAAVFSYFFSFRKNPGVEFPFPAIHLPEVEKVKIREILAKEPEEGGRLDEGNKQMMLMCTSRTIEAKYIDYCTELCNWKVVPVGPPFQDLITNDADNKELIDWLGTKHENSTVFVSFGSEYFLSKEDMEEVAFALELSNVNFIWVARFPKGEERNLEDALPKGFLERIGERGRVLDKFAPQPRILNHPSTGGFISHFGWNSAMESIDFGVPIIAMPIHNDQPINAKLMVELGVAVEIVRDDDGKIHRGEIAETLKSVVTGETGEILRAKVREISKNLKSIRDEEMDAVAEELIQLCRNSNKSK

SEQ ID NO: 115 - protein, 442 aa, Artificial Sequence
  engineered beta-1,2-glycosyltransferase encoded in plasmid pA31076
MATNLRVLMFPWLAYGHISPFLNIAKQLADRGFLIYLCSTRINLESIIKKIPEKYADSIHLIELQLPELPELPPHYHTTNGLPPHLNPTLHKALKMSKPNFSRILQNLKPDLLIYDVLQPWAEHVANEQNIPAGKLLTSCAAVFSYFFSFRKNPGVEFPFPAIHLPEVEKVKIREILAKEPEEGGRLDEGNKQMMLMCTSRTIEAKYIDYCTELCNWKVVPVGPPFQDLITNDADNKELIDWLGTKHENSTVFVSFGSEYFLSKEDMEEVAFALELSNVNFIWVARFPKGEERNLEDALPKGFLERIGERGRVLDKFAPQPRILNHPSTGGFISHYGWNSAMESIDFGVPIIAMPIHNDQPINAKLMVELGVAVEIVRDDDGKIHRGEIAETLKSVVTGETGEILRAKVREISKNLKSIRDEEMDAVAEELIQLCRNSNKSK

SEQ ID NO: 116 - protein, 442 aa, Artificial Sequence
  engineered beta-1,2-glycosyltransferase encoded in plasmid pA31078
MATNLRVLMFPWLAYGHISPFLNIAKQLADRGFLIYLCSTRINLESIIKKIPEKYADSIHLIELQLPELPELPPHYHTTNGLPPHLNPTLHKALKMSKPNFSRILQNLKPDLLIYDVLQPWAEHVANEQNIPAGKLLTSCAAVFSYFFSFRKNPGVEFPFPAIHLPEVEKVKIREILAKEPEEGGRLDEGNKQMMLMCTSRTIEAKYIDYCTELCNWKVVPVGPPFQDLITNDADNKELIDWLGTKHENSTVFVSFGSEYFLSKEDMEEVAFALELSNVNFIWVARFPKGEERNLEDALPKGFLERIGERGRVLDKFAPQPRILNHPSTGGFISHHGWNSAMESIDFGVPIIAMPIHNDQPINAKLMVELGVAVEIVRDDDGKIHRGEIAETLKSVVTGETGEILRAKVREISKNLKSIRDEEMDAVAEELIQLCRNSNKSK

SEQ ID NO: 117 - protein, 442 aa, Artificial Sequence
  engineered beta-1,2-glycosyltransferase encoded in plasmid pA31080
MATNLRVLMFPWLAYGHISPFLNIAKQLADRGFLIYLCSTRINLESIIKKIPEKYADSIHLIELQLPELPELPPHYHTTNGLPPHLNPTLHKALKMSKPNFSRILQNLKPDLLIYDVLQPWAEHVANEQNIPAGKLLTSCAAVFSYFFSFRKNPGVEFPFPAIHLPEVEKVKIREILAKEPEEGGRLDEGNKQMMLMCTSRTIEAKYIDYCTELCNWKVVPVGPPFQDLITNDADNKELIDWLGTKHENSTVFVSFGSEYFLSKEDMEEVAFALELSNVNFIWVARFPKGEERNLEDALPKGFLERIGERGRVLDKFAPQPRILNHPSTGGFISHRGWNSAMESIDFGVPIIAMPIHNDQPINAKLMVELGVAVEIVRDDDGKIHRGEIAETLKSVVTGETGEILRAKVREISKNLKSIRDEEMDAVAEELIQLCRNSNKSK

SEQ ID NO: 118 - protein, 442 aa, Artificial Sequence
  engineered beta-1,2-glycosyltransferase encoded in plasmid pA31081
MATNLRVLMFPWLAYGHISPFLNIAKQLADRGFLIYLCSTRINLESIIKKIPEKYADSIHLIELQLPELPELPPHYHTTNGLPPHLNPTLHKALKMSKPNFSRILQNLKPDLLIYDVLQPWAEHVANEQNIPAGKLLTSCAAVFSYFFSFRKNPGVEFPFPAIHLPEVEKVKIREILAKEPEEGGRLDEGNKQMMLMCTSRTIEAKYIDYCTELCNWKVVPVGPPFQDLITNDADNKELIDWLGTKHENSTVFVSFGSEYFLSKEDMEEVAFALELSNVNFIWVARFPKGEERNLEDALPKGFLERIGERGRVLDKFAPQPRILNHPSTGGFISHQGWNSAMESIDFGVPIIAMPIHNDQPINAKLMVELGVAVEIVRDDDGKIHRGEIAETLKSVVTGETGEILRAKVREISKNLKSIRDEEMDAVAEELIQLCRNSNKSK

SEQ ID NO: 119 - protein, 442 aa, Artificial Sequence
  engineered beta-1,2-glycosyltransferase encoded in plasmid pA31086
MATNLRVLMFPWLAYGHISPFLNIAKQLADRGFLIYLCSTRINLESIIKKIPEKYADSIHLIELQLPELPELPPHYHTTNGLPPHLNPTLHKALKMSKPNFSRILQNLKPDLLIYDVLQPWAEHVANEQNIPAGKLLTSCAAVFSYFFSFRKNPGVEFPFPAIHLPEVEKVKIREILAKEPEEGGRLDEGNKQMMLMCTSRTIEAKYIDYCTELCNWKVVPVGPPFQDLITNDADNKELIDWLGTKHENSTVFVSFGSEYFLSKEDMEEVAFALELSNVNFIWVARFPKGEERNLEDALPKGFLERIGERGRVLDKFAPQPRILNHPSTGGFISHTGWNSAMESIDFGVPIIAMPIHNDQPINAKLMVELGVAVEIVRDDDGKIHRGEIAETLKSVVTGETGEILRAKVREISKNLKSIRDEEMDAVAEELIQLCRNSNKSK

SEQ ID NO: 120 - protein, 442 aa, Artificial Sequence
  engineered beta-1,2-glycosyltransferase encoded in plasmid pA31125
MATNLRVLMFPWLAYGHISPFLNIAKQLADRGFLIYLCSTRINLESIIKKIPEKYADSIHLIELQLPELPELPPHYHTTNGLPPHLNPTLHKALKMSKPNFSRILQNLKPDLLIYDVLQPWAEHVANEQNIPAGKLLTSCAAVFSYFFSFRKNPGVEFPFPAIHLPEVEKVKIREILAKEPEEGGRLDEGNKQMMLMCTSRTIEAKYIDYCTELCNWKVVPVGPPFQDLITNDADNKELIDWLGTKHENSTVFVSFGSEYFLSKEDMEEVAFALELSNVNFIWVARFPKGEERNLEDALPKGFLERIGERGRVLDKFAPQPRILNHPSTGGFISHCGWGSAMESIDFGVPIIAMPIHNDQPINAKLMVELGVAVEIVRDDDGKIHRGEIAETLKSVVTGETGEILRAKVREISKNLKSIRDEEMDAVAEELIQLCRNSNKSK

SEQ ID NO: 121 - protein, 442 aa, Artificial Sequence
  engineered beta-1,2-glycosyltransferase encoded in plasmid pA31126
MATNLRVLMFPWLAYGHISPFLNIAKQLADRGFLIYLCSTRINLESIIKKIPEKYADSIHLIELQLPELPELPPHYHTTNGLPPHLNPTLHKALKMSKPNFSRILQNLKPDLLIYDVLQPWAEHVANEQNIPAGKLLTSCAAVFSYFFSFRKNPGVEFPFPAIHLPEVEKVKIREILAKEPEEGGRLDEGNKQMMLMCTSRTIEAKYIDYCTELCNWKVVPVGPPFQDLITNDADNKELIDWLGTKHENSTVFVSFGSEYFLSKEDMEEVAFALELSNVNFIWVARFPKGEERNLEDALPKGFLERIGERGRVLDKFAPQPRILNHPSTGGFISHCGWPSAMESIDFGVPIIAMPIHNDQPINAKLMVELGVAVEIVRDDDGKIHRGEIAETLKSVVTGETGEILRAKVREISKNLKSIRDEEMDAVAEELIQLCRNSNKSK

SEQ ID NO: 122 - protein, 442 aa, Artificial Sequence
  engineered beta-1,2-glycosyltransferase encoded in plasmid pA31127
MATNLRVLMFPWLAYGHISPFLNIAKQLADRGFLIYLCSTRINLESIIKKIPEKYADSIHLIELQLPELPELPPHYHTTNGLPPHLNPTLHKALKMSKPNFSRILQNLKPDLLIYDVLQPWAEHVANEQNIPAGKLLTSCAAVFSYFFSFRKNPGVEFPFPAIHLPEVEKVKIREILAKEPEEGGRLDEGNKQMMLMCTSRTIEAKYIDYCTELCNWKVVPVGPPFQDLITNDADNKELIDWLGTKHENSTVFVSFGSEYFLSKEDMEEVAFALELSNVNFIWVARFPKGEERNLEDALPKGFLERIGERGRVLDKFAPQPRILNHPSTGGFISHCGWASAMESIDFGVPIIAMPIHNDQPINAKLMVELGVAVEIVRDDDGKIHRGEIAETLKSVVTGETGEILRAKVREISKNLKSIRDEEMDAVAEELIQLCRNSNKSK

SEQ ID NO: 123 - protein, 442 aa, Artificial Sequence
  engineered beta-1,2-glycosyltransferase encoded in plasmid pA31128
MATNLRVLMFPWLAYGHISPFLNIAKQLADRGFLIYLCSTRINLESIIKKIPEKYADSIHLIELQLPELPELPPHYHTTNGLPPHLNPTLHKALKMSKPNFSRILQNLKPDLLIYDVLQPWAEHVANEQNIPAGKLLTSCAAVFSYFFSFRKNPGVEFPFPAIHLPEVEKVKIREILAKEPEEGGRLDEGNKQMMLMCTSRTIEAKYIDYCTELCNWKVVPVGPPFQDLITNDADNKELIDWLGTKHENSTVFVSFGSEYFLSKEDMEEVAFALELSNVNFIWVARFPKGEERNLEDALPKGFLERIGERGRVLDKFAPQPRILNHPSTGGFISHCGWVSAMESIDFGVPIIAMPIHNDQPINAKLMVELGVAVEIVRDDDGKIHRGEIAETLKSVVTGETGEILRAKVREISKNLKSIRDEEMDAVAEELIQLCRNSNKSK

SEQ ID NO: 124 - protein, 442 aa, Artificial Sequence
  engineered beta-1,2-glycosyltransferase encoded in plasmid pA31129
MATNLRVLMFPWLAYGHISPFLNIAKQLADRGFLIYLCSTRINLESIIKKIPEKYADSIHLIELQLPELPELPPHYHTTNGLPPHLNPTLHKALKMSKPNFSRILQNLKPDLLIYDVLQPWAEHVANEQNIPAGKLLTSCAAVFSYFFSFRKNPGVEFPFPAIHLPEVEKVKIREILAKEPEEGGRLDEGNKQMMLMCTSRTIEAKYIDYCTELCNWKVVPVGPPFQDLITNDADNKELIDWLGTKHENSTVFVSFGSEYFLSKEDMEEVAFALELSNVNFIWVARFPKGEERNLEDALPKGFLERIGERGRVLDKFAPQPRILNHPSTGGFISHCGWLSAMESIDFGVPIIAMPIHNDQPINAKLMVELGVAVEIVRDDDGKIHRGEIAETLKSVVTGETGEILRAKVREISKNLKSIRDEEMDAVAEELIQLCRNSNKSK

SEQ ID NO: 125 - protein, 442 aa, Artificial Sequence
  engineered beta-1,2-glycosyltransferase encoded in plasmid pA31130
MATNLRVLMFPWLAYGHISPFLNIAKQLADRGFLIYLCSTRINLESIIKKIPEKYADSIHLIELQLPELPELPPHYHTTNGLPPHLNPTLHKALKMSKPNFSRILQNLKPDLLIYDVLQPWAEHVANEQNIPAGKLLTSCAAVFSYFFSFRKNPGVEFPFPAIHLPEVEKVKIREILAKEPEEGGRLDEGNKQMMLMCTSRTIEAKYIDYCTELCNWKVVPVGPPFQDLITNDADNKELIDWLGTKHENSTVFVSFGSEYFLSKEDMEEVAFALELSNVNFIWVARFPKGEERNLEDALPKGFLERIGERGRVLDKFAPQPRILNHPSTGGFISHCGWISAMESIDFGVPIIAMPIHNDQPINAKLMVELGVAVEIVRDDDGKIHRGEIAETLKSVVTGETGEILRAKVREISKNLKSIRDEEMDAVAEELIQLCRNSNKSK

SEQ ID NO: 126 - protein, 442 aa, Artificial Sequence
  engineered beta-1,2-glycosyltransferase encoded in plasmid pA31134
MATNLRVLMFPWLAYGHISPFLNIAKQLADRGFLIYLCSTRINLESIIKKIPEKYADSIHLIELQLPELPELPPHYHTTNGLPPHLNPTLHKALKMSKPNFSRILQNLKPDLLIYDVLQPWAEHVANEQNIPAGKLLTSCAAVFSYFFSFRKNPGVEFPFPAIHLPEVEKVKIREILAKEPEEGGRLDEGNKQMMLMCTSRTIEAKYIDYCTELCNWKVVPVGPPFQDLITNDADNKELIDWLGTKHENSTVFVSFGSEYFLSKEDMEEVAFALELSNVNFIWVARFPKGEERNLEDALPKGFLERIGERGRVLDKFAPQPRILNHPSTGGFISHCGWYSAMESIDFGVPIIAMPIHNDQPINAKLMVELGVAVEIVRDDDGKIHRGEIAETLKSVVTGETGEILRAKVREISKNLKSIRDEEMDAVAEELIQLCRNSNKSK

SEQ ID NO: 127 - protein, 442 aa, Artificial Sequence
  engineered beta-1,2-glycosyltransferase encoded in plasmid pA31135
MATNLRVLMFPWLAYGHISPFLNIAKQLADRGFLIYLCSTRINLESIIKKIPEKYADSIHLIELQLPELPELPPHYHTTNGLPPHLNPTLHKALKMSKPNFSRILQNLKPDLLIYDVLQPWAEHVANEQNIPAGKLLTSCAAVFSYFFSFRKNPGVEFPFPAIHLPEVEKVKIREILAKEPEEGGRLDEGNKQMMLMCTSRTIEAKYIDYCTELCNWKVVPVGPPFQDLITNDADNKELIDWLGTKHENSTVFVSFGSEYFLSKEDMEEVAFALELSNVNFIWVARFPKGEERNLEDALPKGFLERIGERGRVLDKFAPQPRILNHPSTGGFISHCGWWSAMESIDFGVPIIAMPIHNDQPINAKLMVELGVAVEIVRDDDGKIHRGEIAETLKSVVTGETGEILRAKVREISKNLKSIRDEEMDAVAEELIQLCRNSNKSK

SEQ ID NO: 128 - protein, 442 aa, Artificial Sequence
  engineered beta-1,2-glycosyltransferase encoded in plasmid pA31136
MATNLRVLMFPWLAYGHISPFLNIAKQLADRGFLIYLCSTRINLESIIKKIPEKYADSIHLIELQLPELPELPPHYHTTNGLPPHLNPTLHKALKMSKPNFSRILQNLKPDLLIYDVLQPWAEHVANEQNIPAGKLLTSCAAVFSYFFSFRKNPGVEFPFPAIHLPEVEKVKIREILAKEPEEGGRLDEGNKQMMLMCTSRTIEAKYIDYCTELCNWKVVPVGPPFQDLITNDADNKELIDWLGTKHENSTVFVSFGSEYFLSKEDMEEVAFALELSNVNFIWVARFPKGEERNLEDALPKGFLERIGERGRVLDKFAPQPRILNHPSTGGFISHCGWHSAMESIDFGVPIIAMPIHNDQPINAKLMVELGVAVEIVRDDDGKIHRGEIAETLKSVVTGETGEILRAKVREISKNLKSIRDEEMDAVAEELIQLCRNSNKSK

SEQ ID NO: 129 - protein, 442 aa, Artificial Sequence
  engineered beta-1,2-glycosyltransferase encoded in plasmid pA31138
MATNLRVLMFPWLAYGHISPFLNIAKQLADRGFLIYLCSTRINLESIIKKIPEKYADSIHLIELQLPELPELPPHYHTTNGLPPHLNPTLHKALKMSKPNFSRILQNLKPDLLIYDVLQPWAEHVANEQNIPAGKLLTSCAAVFSYFFSFRKNPGVEFPFPAIHLPEVEKVKIREILAKEPEEGGRLDEGNKQMMLMCTSRTIEAKYIDYCTELCNWKVVPVGPPFQDLITNDADNKELIDWLGTKHENSTVFVSFGSEYFLSKEDMEEVAFALELSNVNFIWVARFPKGEERNLEDALPKGFLERIGERGRVLDKFAPQPRILNHPSTGGFISHCGWRSAMESIDFGVPIIAMPIHNDQPINAKLMVELGVAVEIVRDDDGKIHRGEIAETLKSVVTGETGEILRAKVREISKNLKSIRDEEMDAVAEELIQLCRNSNKSK

SEQ ID NO: 130 - protein, 442 aa, Artificial Sequence
  engineered beta-1,2-glycosyltransferase encoded in plasmid pA31142
MATNLRVLMFPWLAYGHISPFLNIAKQLADRGFLIYLCSTRINLESIIKKIPEKYADSIHLIELQLPELPELPPHYHTTNGLPPHLNPTLHKALKMSKPNFSRILQNLKPDLLIYDVLQPWAEHVANEQNIPAGKLLTSCAAVFSYFFSFRKNPGVEFPFPAIHLPEVEKVKIREILAKEPEEGGRLDEGNKQMMLMCTSRTIEAKYIDYCTELCNWKVVPVGPPFQDLITNDADNKELIDWLGTKHENSTVFVSFGSEYFLSKEDMEEVAFALELSNVNFIWVARFPKGEERNLEDALPKGFLERIGERGRVLDKFAPQPRILNHPSTGGFISHCGWSSAMESIDFGVPIIAMPIHNDQPINAKLMVELGVAVEIVRDDDGKIHRGEIAETLKSVVTGETGEILRAKVREISKNLKSIRDEEMDAVAEELIQLCRNSNKSK

SEQ ID NO: 131 - protein, 442 aa, Artificial Sequence
  engineered beta-1,2-glycosyltransferase encoded in plasmid pA31163
MATNLRVLMFPWLAYGHISPFLNIAKQLADRGFLIYLCSTRINLESIIKKIPEKYADSIHLIELQLPELPELPPHYHTTNGLPPHLNPTLHKALKMSKPNFSRILQNLKPDLLIYDVLQPWAEHVANEQNIPAGKLLTSCAAVFSYFFSFRKNPGVEFPFPAIHLPEVEKVKIREILAKEPEEGGRLDEGNKQMMLMCTSRTIEAKYIDYCTELCNWKVVPVGPPFQDLITNDADNKELIDWLGTKHENSTVFVSFGSEYFLSKEDMEEVAFALELSNVNFIWVARFPKGEERNLEDALPKGFLERIGERGRVLDKFAPQPRILNHPSTGGFISHCGWNSGMESIDFGVPIIAMPIHNDQPINAKLMVELGVAVEIVRDDDGKIHRGEIAETLKSVVTGETGEILRAKVREISKNLKSIRDEEMDAVAEELIQLCRNSNKSK

SEQ ID NO: 132 - protein, 442 aa, Artificial Sequence
  engineered beta-1,2-glycosyltransferase encoded in plasmid pA31167
MATNLRVLMFPWLAYGHISPFLNIAKQLADRGFLIYLCSTRINLESIIKKIPEKYADSIHLIELQLPELPELPPHYHTTNGLPPHLNPTLHKALKMSKPNFSRILQNLKPDLLIYDVLQPWAEHVANEQNIPAGKLLTSCAAVFSYFFSFRKNPGVEFPFPAIHLPEVEKVKIREILAKEPEEGGRLDEGNKQMMLMCTSRTIEAKYIDYCTELCNWKVVPVGPPFQDLITNDADNKELIDWLGTKHENSTVFVSFGSEYFLSKEDMEEVAFALELSNVNFIWVARFPKGEERNLEDALPKGFLERIGERGRVLDKFAPQPRILNHPSTGGFISHCGWNSIMESIDFGVPIIAMPIHNDQPINAKLMVELGVAVEIVRDDDGKIHRGEIAETLKSVVTGETGEILRAKVREISKNLKSIRDEEMDAVAEELIQLCRNSNKSK

SEQ ID NO: 133 - protein, 442 aa, Artificial Sequence
  engineered beta-1,2-glycosyltransferase encoded in plasmid pA31169
MATNLRVLMFPWLAYGHISPFLNIAKQLADRGFLIYLCSTRINLESIIKKIPEKYADSIHLIELQLPELPELPPHYHTTNGLPPHLNPTLHKALKMSKPNFSRILQNLKPDLLIYDVLQPWAEHVANEQNIPAGKLLTSCAAVFSYFFSFRKNPGVEFPFPAIHLPEVEKVKIREILAKEPEEGGRLDEGNKQMMLMCTSRTIEAKYIDYCTELCNWKVVPVGPPFQDLITNDADNKELIDWLGTKHENSTVFVSFGSEYFLSKEDMEEVAFALELSNVNFIWVARFPKGEERNLEDALPKGFLERIGERGRVLDKFAPQPRILNHPSTGGFISHCGWNSCMESIDFGVPIIAMPIHNDQPINAKLMVELGVAVEIVRDDDGKIHRGEIAETLKSVVTGETGEILRAKVREISKNLKSIRDEEMDAVAEELIQLCRNSNKSK

SEQ ID NO: 134 - protein, 442 aa, Artificial Sequence
  engineered beta-1,2-glycosyltransferase encoded in plasmid pA31172
MATNLRVLMFPWLAYGHISPFLNIAKQLADRGFLIYLCSTRINLESIIKKIPEKYADSIHLIELQLPELPELPPHYHTTNGLPPHLNPTLHKALKMSKPNFSRILQNLKPDLLIYDVLQPWAEHVANEQNIPAGKLLTSCAAVFSYFFSFRKNPGVEFPFPAIHLPEVEKVKIREILAKEPEEGGRLDEGNKQMMLMCTSRTIEAKYIDYCTELCNWKVVPVGPPFQDLITNDADNKELIDWLGTKHENSTVFVSFGSEYFLSKEDMEEVAFALELSNVNFIWVARFPKGEERNLEDALPKGFLERIGERGRVLDKFAPQPRILNHPSTGGFISHCGWNSWMESIDFGVPIIAMPIHNDQPINAKLMVELGVAVEIVRDDDGKIHRGEIAETLKSVVTGETGEILRAKVREISKNLKSIRDEEMDAVAEELIQLCRNSNKSK

SEQ ID NO: 135 - protein, 442 aa, Artificial Sequence
  engineered beta-1,2-glycosyltransferase encoded in plasmid pA31173
MATNLRVLMFPWLAYGHISPFLNIAKQLADRGFLIYLCSTRINLESIIKKIPEKYADSIHLIELQLPELPELPPHYHTTNGLPPHLNPTLHKALKMSKPNFSRILQNLKPDLLIYDVLQPWAEHVANEQNIPAGKLLTSCAAVFSYFFSFRKNPGVEFPFPAIHLPEVEKVKIREILAKEPEEGGRLDEGNKQMMLMCTSRTIEAKYIDYCTELCNWKVVPVGPPFQDLITNDADNKELIDWLGTKHENSTVFVSFGSEYFLSKEDMEEVAFALELSNVNFIWVARFPKGEERNLEDALPKGFLERIGERGRVLDKFAPQPRILNHPSTGGFISHCGWNSHMESIDFGVPIIAMPIHNDQPINAKLMVELGVAVEIVRDDDGKIHRGEIAETLKSVVTGETGEILRAKVREISKNLKSIRDEEMDAVAEELIQLCRNSNKSK

SEQ ID NO: 136 - protein, 442 aa, Artificial Sequence
  engineered beta-1,2-glycosyltransferase encoded in plasmid pA31174
MATNLRVLMFPWLAYGHISPFLNIAKQLADRGFLIYLCSTRINLESIIKKIPEKYADSIHLIELQLPELPELPPHYHTTNGLPPHLNPTLHKALKMSKPNFSRILQNLKPDLLIYDVLQPWAEHVANEQNIPAGKLLTSCAAVFSYFFSFRKNPGVEFPFPAIHLPEVEKVKIREILAKEPEEGGRLDEGNKQMMLMCTSRTIEAKYIDYCTELCNWKVVPVGPPFQDLITNDADNKELIDWLGTKHENSTVFVSFGSEYFLSKEDMEEVAFALELSNVNFIWVARFPKGEERNLEDALPKGFLERIGERGRVLDKFAPQPRILNHPSTGGFISHCGWNSKMESIDFGVPIIAMPIHNDQPINAKLMVELGVAVEIVRDDDGKIHRGEIAETLKSVVTGETGEILRAKVREISKNLKSIRDEEMDAVAEELIQLCRNSNKSK

SEQ ID NO: 137 - protein, 442 aa, Artificial Sequence
  engineered beta-1,2-glycosyltransferase encoded in plasmid pA31175
MATNLRVLMFPWLAYGHISPFLNIAKQLADRGFLIYLCSTRINLESIIKKIPEKYADSIHLIELQLPELPELPPHYHTTNGLPPHLNPTLHKALKMSKPNFSRILQNLKPDLLIYDVLQPWAEHVANEQNIPAGKLLTSCAAVFSYFFSFRKNPGVEFPFPAIHLPEVEKVKIREILAKEPEEGGRLDEGNKQMMLMCTSRTIEAKYIDYCTELCNWKVVPVGPPFQDLITNDADNKELIDWLGTKHENSTVFVSFGSEYFLSKEDMEEVAFALELSNVNFIWVARFPKGEERNLEDALPKGFLERIGERGRVLDKFAPQPRILNHPSTGGFISHCGWNSRMESIDFGVPIIAMPIHNDQPINAKLMVELGVAVEIVRDDDGKIHRGEIAETLKSVVTGETGEILRAKVREISKNLKSIRDEEMDAVAEELIQLCRNSNKSK

SEQ ID NO: 138 - protein, 442 aa, Artificial Sequence
  engineered beta-1,2-glycosyltransferase encoded in plasmid pA31177
MATNLRVLMFPWLAYGHISPFLNIAKQLADRGFLIYLCSTRINLESIIKKIPEKYADSIHLIELQLPELPELPPHYHTTNGLPPHLNPTLHKALKMSKPNFSRILQNLKPDLLIYDVLQPWAEHVANEQNIPAGKLLTSCAAVFSYFFSFRKNPGVEFPFPAIHLPEVEKVKIREILAKEPEEGGRLDEGNKQMMLMCTSRTIEAKYIDYCTELCNWKVVPVGPPFQDLITNDADNKELIDWLGTKHENSTVFVSFGSEYFLSKEDMEEVAFALELSNVNFIWVARFPKGEERNLEDALPKGFLERIGERGRVLDKFAPQPRILNHPSTGGFISHCGWNSNMESIDFGVPIIAMPIHNDQPINAKLMVELGVAVEIVRDDDGKIHRGEIAETLKSVVTGETGEILRAKVREISKNLKSIRDEEMDAVAEELIQLCRNSNKSK

SEQ ID NO: 139 - protein, 442 aa, Artificial Sequence
  engineered beta-1,2-glycosyltransferase encoded in plasmid pA31178
MATNLRVLMFPWLAYGHISPFLNIAKQLADRGFLIYLCSTRINLESIIKKIPEKYADSIHLIELQLPELPELPPHYHTTNGLPPHLNPTLHKALKMSKPNFSRILQNLKPDLLIYDVLQPWAEHVANEQNIPAGKLLTSCAAVFSYFFSFRKNPGVEFPFPAIHLPEVEKVKIREILAKEPEEGGRLDEGNKQMMLMCTSRTIEAKYIDYCTELCNWKVVPVGPPFQDLITNDADNKELIDWLGTKHENSTVFVSFGSEYFLSKEDMEEVAFALELSNVNFIWVARFPKGEERNLEDALPKGFLERIGERGRVLDKFAPQPRILNHPSTGGFISHCGWNSEMESIDFGVPIIAMPIHNDQPINAKLMVELGVAVEIVRDDDGKIHRGEIAETLKSVVTGETGEILRAKVREISKNLKSIRDEEMDAVAEELIQLCRNSNKSK

SEQ ID NO: 140 - protein, 442 aa, Artificial Sequence
  engineered beta-1,2-glycosyltransferase encoded in plasmid pA31179
MATNLRVLMFPWLAYGHISPFLNIAKQLADRGFLIYLCSTRINLESIIKKIPEKYADSIHLIELQLPELPELPPHYHTTNGLPPHLNPTLHKALKMSKPNFSRILQNLKPDLLIYDVLQPWAEHVANEQNIPAGKLLTSCAAVFSYFFSFRKNPGVEFPFPAIHLPEVEKVKIREILAKEPEEGGRLDEGNKQMMLMCTSRTIEAKYIDYCTELCNWKVVPVGPPFQDLITNDADNKELIDWLGTKHENSTVFVSFGSEYFLSKEDMEEVAFALELSNVNFIWVARFPKGEERNLEDALPKGFLERIGERGRVLDKFAPQPRILNHPSTGGFISHCGWNSDMESIDFGVPIIAMPIHNDQPINAKLMVELGVAVEIVRDDDGKIHRGEIAETLKSVVTGETGEILRAKVREISKNLKSIRDEEMDAVAEELIQLCRNSNKSK

SEQ ID NO: 141 - protein, 442 aa, Artificial Sequence
  engineered beta-1,2-glycosyltransferase encoded in plasmid pA31181
MATNLRVLMFPWLAYGHISPFLNIAKQLADRGFLIYLCSTRINLESIIKKIPEKYADSIHLIELQLPELPELPPHYHTTNGLPPHLNPTLHKALKMSKPNFSRILQNLKPDLLIYDVLQPWAEHVANEQNIPAGKLLTSCAAVFSYFFSFRKNPGVEFPFPAIHLPEVEKVKIREILAKEPEEGGRLDEGNKQMMLMCTSRTIEAKYIDYCTELCNWKVVPVGPPFQDLITNDADNKELIDWLGTKHENSTVFVSFGSEYFLSKEDMEEVAFALELSNVNFIWVARFPKGEERNLEDALPKGFLERIGERGRVLDKFAPQPRILNHPSTGGFISHCGWNSTMESIDFGVPIIAMPIHNDQPINAKLMVELGVAVEIVRDDDGKIHRGEIAETLKSVVTGETGEILRAKVREISKNLKSIRDEEMDAVAEELIQLCRNSNKSK

SEQ ID NO: 142 - protein, 442 aa, Artificial Sequence
  engineered beta-1,2-glycosyltransferase encoded in plasmid pA31258
MATNLRVLMFPWLAYGHISPFLNIAKQLADRGFLIYLCSTRINLESIIKKIPEKYADSIHLIELQLPELPELPPHYHTTNGLPPHLNPTLHKALKMSKPNFSRILQNLKPDLLIYDVLQPWAEHVANEQNIPAGKLLTSCAAVFSYFFSFRKNPGVEFPFPAIHLPEVEKVKIREILAKEPEEGGRLDEGNKQMMLMCTSRTIEAKYIDYCTELCNWKVVPVGPPFQDLITNDADNKELIDWLGTKHENSTVFVSFGSEYFLSKEDMEEVAFALELSNVNFIWVARFPKGEERNLEDALPKGFLERIGERGRVLDKFAPQPRILNHPSTGGFISHCGWNSAMESIDFGVPIIAMPIHGDQPINAKLMVELGVAVEIVRDDDGKIHRGEIAETLKSVVTGETGEILRAKVREISKNLKSIRDEEMDAVAEELIQLCRNSNKSK

SEQ ID NO: 143 - protein, 442 aa, Artificial Sequence
  engineered beta-1,2-glycosyltransferase encoded in plasmid pA31259
MATNLRVLMFPWLAYGHISPFLNIAKQLADRGFLIYLCSTRINLESIIKKIPEKYADSIHLIELQLPELPELPPHYHTTNGLPPHLNPTLHKALKMSKPNFSRILQNLKPDLLIYDVLQPWAEHVANEQNIPAGKLLTSCAAVFSYFFSFRKNPGVEFPFPAIHLPEVEKVKIREILAKEPEEGGRLDEGNKQMMLMCTSRTIEAKYIDYCTELCNWKVVPVGPPFQDLITNDADNKELIDWLGTKHENSTVFVSFGSEYFLSKEDMEEVAFALELSNVNFIWVARFPKGEERNLEDALPKGFLERIGERGRVLDKFAPQPRILNHPSTGGFISHCGWNSAMESIDFGVPIIAMPIHPDQPINAKLMVELGVAVEIVRDDDGKIHRGEIAETLKSVVTGETGEILRAKVREISKNLKSIRDEEMDAVAEELIQLCRNSNKSK

SEQ ID NO: 144 - protein, 442 aa, Artificial Sequence
  engineered beta-1,2-glycosyltransferase encoded in plasmid pA31261
MATNLRVLMFPWLAYGHISPFLNIAKQLADRGFLIYLCSTRINLESIIKKIPEKYADSIHLIELQLPELPELPPHYHTTNGLPPHLNPTLHKALKMSKPNFSRILQNLKPDLLIYDVLQPWAEHVANEQNIPAGKLLTSCAAVFSYFFSFRKNPGVEFPFPAIHLPEVEKVKIREILAKEPEEGGRLDEGNKQMMLMCTSRTIEAKYIDYCTELCNWKVVPVGPPFQDLITNDADNKELIDWLGTKHENSTVFVSFGSEYFLSKEDMEEVAFALELSNVNFIWVARFPKGEERNLEDALPKGFLERIGERGRVLDKFAPQPRILNHPSTGGFISHCGWNSAMESIDFGVPIIAMPIHVDQPINAKLMVELGVAVEIVRDDDGKIHRGEIAETLKSVVTGETGEILRAKVREISKNLKSIRDEEMDAVAEELIQLCRNSNKSK

SEQ ID NO: 145 - protein, 442 aa, Artificial Sequence
  engineered beta-1,2-glycosyltransferase encoded in plasmid pA31262
MATNLRVLMFPWLAYGHISPFLNIAKQLADRGFLIYLCSTRINLESIIKKIPEKYADSIHLIELQLPELPELPPHYHTTNGLPPHLNPTLHKALKMSKPNFSRILQNLKPDLLIYDVLQPWAEHVANEQNIPAGKLLTSCAAVFSYFFSFRKNPGVEFPFPAIHLPEVEKVKIREILAKEPEEGGRLDEGNKQMMLMCTSRTIEAKYIDYCTELCNWKVVPVGPPFQDLITNDADNKELIDWLGTKHENSTVFVSFGSEYFLSKEDMEEVAFALELSNVNFIWVARFPKGEERNLEDALPKGFLERIGERGRVLDKFAPQPRILNHPSTGGFISHCGWNSAMESIDFGVPIIAMPIHLDQPINAKLMVELGVAVEIVRDDDGKIHRGEIAETLKSVVTGETGEILRAKVREISKNLKSIRDEEMDAVAEELIQLCRNSNKSK

SEQ ID NO: 146 - protein, 442 aa, Artificial Sequence
  engineered beta-1,2-glycosyltransferase encoded in plasmid pA31263
MATNLRVLMFPWLAYGHISPFLNIAKQLADRGFLIYLCSTRINLESIIKKIPEKYADSIHLIELQLPELPELPPHYHTTNGLPPHLNPTLHKALKMSKPNFSRILQNLKPDLLIYDVLQPWAEHVANEQNIPAGKLLTSCAAVFSYFFSFRKNPGVEFPFPAIHLPEVEKVKIREILAKEPEEGGRLDEGNKQMMLMCTSRTIEAKYIDYCTELCNWKVVPVGPPFQDLITNDADNKELIDWLGTKHENSTVFVSFGSEYFLSKEDMEEVAFALELSNVNFIWVARFPKGEERNLEDALPKGFLERIGERGRVLDKFAPQPRILNHPSTGGFISHCGWNSAMESIDFGVPIIAMPIHIDQPINAKLMVELGVAVEIVRDDDGKIHRGEIAETLKSVVTGETGEILRAKVREISKNLKSIRDEEMDAVAEELIQLCRNSNKSK

SEQ ID NO: 147 - protein, 442 aa, Artificial Sequence
  engineered beta-1,2-glycosyltransferase encoded in plasmid pA31264
MATNLRVLMFPWLAYGHISPFLNIAKQLADRGFLIYLCSTRINLESIIKKIPEKYADSIHLIELQLPELPELPPHYHTTNGLPPHLNPTLHKALKMSKPNFSRILQNLKPDLLIYDVLQPWAEHVANEQNIPAGKLLTSCAAVFSYFFSFRKNPGVEFPFPAIHLPEVEKVKIREILAKEPEEGGRLDEGNKQMMLMCTSRTIEAKYIDYCTELCNWKVVPVGPPFQDLITNDADNKELIDWLGTKHENSTVFVSFGSEYFLSKEDMEEVAFALELSNVNFIWVARFPKGEERNLEDALPKGFLERIGERGRVLDKFAPQPRILNHPSTGGFISHCGWNSAMESIDFGVPIIAMPIHMDQPINAKLMVELGVAVEIVRDDDGKIHRGEIAETLKSVVTGETGEILRAKVREISKNLKSIRDEEMDAVAEELIQLCRNSNKSK

SEQ ID NO: 148 - protein, 442 aa, Artificial Sequence
  engineered beta-1,2-glycosyltransferase encoded in plasmid pA31265
MATNLRVLMFPWLAYGHISPFLNIAKQLADRGFLIYLCSTRINLESIIKKIPEKYADSIHLIELQLPELPELPPHYHTTNGLPPHLNPTLHKALKMSKPNFSRILQNLKPDLLIYDVLQPWAEHVANEQNIPAGKLLTSCAAVFSYFFSFRKNPGVEFPFPAIHLPEVEKVKIREILAKEPEEGGRLDEGNKQMMLMCTSRTIEAKYIDYCTELCNWKVVPVGPPFQDLITNDADNKELIDWLGTKHENSTVFVSFGSEYFLSKEDMEEVAFALELSNVNFIWVARFPKGEERNLEDALPKGFLERIGERGRVLDKFAPQPRILNHPSTGGFISHCGWNSAMESIDFGVPIIAMPIHCDQPINAKLMVELGVAVEIVRDDDGKIHRGEIAETLKSVVTGETGEILRAKVREISKNLKSIRDEEMDAVAEELIQLCRNSNKSK

SEQ ID NO: 149 - protein, 442 aa, Artificial Sequence
  engineered beta-1,2-glycosyltransferase encoded in plasmid pA31267
MATNLRVLMFPWLAYGHISPFLNIAKQLADRGFLIYLCSTRINLESIIKKIPEKYADSIHLIELQLPELPELPPHYHTTNGLPPHLNPTLHKALKMSKPNFSRILQNLKPDLLIYDVLQPWAEHVANEQNIPAGKLLTSCAAVFSYFFSFRKNPGVEFPFPAIHLPEVEKVKIREILAKEPEEGGRLDEGNKQMMLMCTSRTIEAKYIDYCTELCNWKVVPVGPPFQDLITNDADNKELIDWLGTKHENSTVFVSFGSEYFLSKEDMEEVAFALELSNVNFIWVARFPKGEERNLEDALPKGFLERIGERGRVLDKFAPQPRILNHPSTGGFISHCGWNSAMESIDFGVPIIAMPIHYDQPINAKLMVELGVAVEIVRDDDGKIHRGEIAETLKSVVTGETGEILRAKVREISKNLKSIRDEEMDAVAEELIQLCRNSNKSK

SEQ ID NO: 150 - protein, 442 aa, Artificial Sequence
  engineered beta-1,2-glycosyltransferase encoded in plasmid pA31268
MATNLRVLMFPWLAYGHISPFLNIAKQLADRGFLIYLCSTRINLESIIKKIPEKYADSIHLIELQLPELPELPPHYHTTNGLPPHLNPTLHKALKMSKPNFSRILQNLKPDLLIYDVLQPWAEHVANEQNIPAGKLLTSCAAVFSYFFSFRKNPGVEFPFPAIHLPEVEKVKIREILAKEPEEGGRLDEGNKQMMLMCTSRTIEAKYIDYCTELCNWKVVPVGPPFQDLITNDADNKELIDWLGTKHENSTVFVSFGSEYFLSKEDMEEVAFALELSNVNFIWVARFPKGEERNLEDALPKGFLERIGERGRVLDKFAPQPRILNHPSTGGFISHCGWNSAMESIDFGVPIIAMPIHWDQPINAKLMVELGVAVEIVRDDDGKIHRGEIAETLKSVVTGETGEILRAKVREISKNLKSIRDEEMDAVAEELIQLCRNSNKSK

SEQ ID NO: 151 - protein, 442 aa, Artificial Sequence
  engineered beta-1,2-glycosyltransferase encoded in plasmid pA31273
MATNLRVLMFPWLAYGHISPFLNIAKQLADRGFLIYLCSTRINLESIIKKIPEKYADSIHLIELQLPELPELPPHYHTTNGLPPHLNPTLHKALKMSKPNFSRILQNLKPDLLIYDVLQPWAEHVANEQNIPAGKLLTSCAAVFSYFFSFRKNPGVEFPFPAIHLPEVEKVKIREILAKEPEEGGRLDEGNKQMMLMCTSRTIEAKYIDYCTELCNWKVVPVGPPFQDLITNDADNKELIDWLGTKHENSTVFVSFGSEYFLSKEDMEEVAFALELSNVNFIWVARFPKGEERNLEDALPKGFLERIGERGRVLDKFAPQPRILNHPSTGGFISHCGWNSAMESIDFGVPIIAMPIHEDQPINAKLMVELGVAVEIVRDDDGKIHRGEIAETLKSVVTGETGEILRAKVREISKNLKSIRDEEMDAVAEELIQLCRNSNKSK

SEQ ID NO: 152 - protein, 442 aa, Artificial Sequence
  engineered beta-1,2-glycosyltransferase encoded in plasmid pA31274
MATNLRVLMFPWLAYGHISPFLNIAKQLADRGFLIYLCSTRINLESIIKKIPEKYADSIHLIELQLPELPELPPHYHTTNGLPPHLNPTLHKALKMSKPNFSRILQNLKPDLLIYDVLQPWAEHVANEQNIPAGKLLTSCAAVFSYFFSFRKNPGVEFPFPAIHLPEVEKVKIREILAKEPEEGGRLDEGNKQMMLMCTSRTIEAKYIDYCTELCNWKVVPVGPPFQDLITNDADNKELIDWLGTKHENSTVFVSFGSEYFLSKEDMEEVAFALELSNVNFIWVARFPKGEERNLEDALPKGFLERIGERGRVLDKFAPQPRILNHPSTGGFISHCGWNSAMESIDFGVPIIAMPIHDDQPINAKLMVELGVAVEIVRDDDGKIHRGEIAETLKSVVTGETGEILRAKVREISKNLKSIRDEEMDAVAEELIQLCRNSNKSK

SEQ ID NO: 153 - protein, 442 aa, Artificial Sequence
  engineered beta-1,2-glycosyltransferase encoded in plasmid pA31276
MATNLRVLMFPWLAYGHISPFLNIAKQLADRGFLIYLCSTRINLESIIKKIPEKYADSIHLIELQLPELPELPPHYHTTNGLPPHLNPTLHKALKMSKPNFSRILQNLKPDLLIYDVLQPWAEHVANEQNIPAGKLLTSCAAVFSYFFSFRKNPGVEFPFPAIHLPEVEKVKIREILAKEPEEGGRLDEGNKQMMLMCTSRTIEAKYIDYCTELCNWKVVPVGPPFQDLITNDADNKELIDWLGTKHENSTVFVSFGSEYFLSKEDMEEVAFALELSNVNFIWVARFPKGEERNLEDALPKGFLERIGERGRVLDKFAPQPRILNHPSTGGFISHCGWNSAMESIDFGVPIIAMPIHTDQPINAKLMVELGVAVEIVRDDDGKIHRGEIAETLKSVVTGETGEILRAKVREISKNLKSIRDEEMDAVAEELIQLCRNSNKSK

SEQ ID NO: 154 - protein, 442 aa, Artificial Sequence
  engineered beta-1,2-glycosyltransferase encoded in plasmid pA31278
MATNLRVLMFPWLAYGHISPFLNIAKQLADRGFLIYLCSTRINLESIIKKIPEKYADSIHLIELQLPELPELPPHYHTTNGLPPHLNPTLHKALKMSKPNFSRILQNLKPDLLIYDVLQPWAEHVANEQNIPAGKLLTSCAAVFSYFFSFRKNPGVEFPFPAIHLPEVEKVKIREILAKEPEEGGRLDEGNKQMMLMCTSRTIEAKYIDYCTELCNWKVVPVGPPFQDLITNDADNKELIDWLGTKHENSTVFVSFGSEYFLSKEDMEEVAFALELSNVNFIWVARFPKGEERNLEDALPKGFLERIGERGRVLDKFAPQPRILNHPSTGGFISHCGWNSAMESIDFGVPIIAMPIHNPQPINAKLMVELGVAVEIVRDDDGKIHRGEIAETLKSVVTGETGEILRAKVREISKNLKSIRDEEMDAVAEELIQLCRNSNKSK

SEQ ID NO: 155 - protein, 442 aa, Artificial Sequence
  engineered beta-1,2-glycosyltransferase encoded in plasmid pA31279
MATNLRVLMFPWLAYGHISPFLNIAKQLADRGFLIYLCSTRINLESIIKKIPEKYADSIHLIELQLPELPELPPHYHTTNGLPPHLNPTLHKALKMSKPNFSRILQNLKPDLLIYDVLQPWAEHVANEQNIPAGKLLTSCAAVFSYFFSFRKNPGVEFPFPAIHLPEVEKVKIREILAKEPEEGGRLDEGNKQMMLMCTSRTIEAKYIDYCTELCNWKVVPVGPPFQDLITNDADNKELIDWLGTKHENSTVFVSFGSEYFLSKEDMEEVAFALELSNVNFIWVARFPKGEERNLEDALPKGFLERIGERGRVLDKFAPQPRILNHPSTGGFISHCGWNSAMESIDFGVPIIAMPIHNAQPINAKLMVELGVAVEIVRDDDGKIHRGEIAETLKSVVTGETGEILRAKVREISKNLKSIRDEEMDAVAEELIQLCRNSNKSK

SEQ ID NO: 156 - protein, 442 aa, Artificial Sequence
  engineered beta-1,2-glycosyltransferase encoded in plasmid pA31280
MATNLRVLMFPWLAYGHISPFLNIAKQLADRGFLIYLCSTRINLESIIKKIPEKYADSIHLIELQLPELPELPPHYHTTNGLPPHLNPTLHKALKMSKPNFSRILQNLKPDLLIYDVLQPWAEHVANEQNIPAGKLLTSCAAVFSYFFSFRKNPGVEFPFPAIHLPEVEKVKIREILAKEPEEGGRLDEGNKQMMLMCTSRTIEAKYIDYCTELCNWKVVPVGPPFQDLITNDADNKELIDWLGTKHENSTVFVSFGSEYFLSKEDMEEVAFALELSNVNFIWVARFPKGEERNLEDALPKGFLERIGERGRVLDKFAPQPRILNHPSTGGFISHCGWNSAMESIDFGVPIIAMPIHNVQPINAKLMVELGVAVEIVRDDDGKIHRGEIAETLKSVVTGETGEILRAKVREISKNLKSIRDEEMDAVAEELIQLCRNSNKSK

SEQ ID NO: 157 - protein, 442 aa, Artificial Sequence
  engineered beta-1,2-glycosyltransferase encoded in plasmid pA31282
MATNLRVLMFPWLAYGHISPFLNIAKQLADRGFLIYLCSTRINLESIIKKIPEKYADSIHLIELQLPELPELPPHYHTTNGLPPHLNPTLHKALKMSKPNFSRILQNLKPDLLIYDVLQPWAEHVANEQNIPAGKLLTSCAAVFSYFFSFRKNPGVEFPFPAIHLPEVEKVKIREILAKEPEEGGRLDEGNKQMMLMCTSRTIEAKYIDYCTELCNWKVVPVGPPFQDLITNDADNKELIDWLGTKHENSTVFVSFGSEYFLSKEDMEEVAFALELSNVNFIWVARFPKGEERNLEDALPKGFLERIGERGRVLDKFAPQPRILNHPSTGGFISHCGWNSAMESIDFGVPIIAMPIHNIQPINAKLMVELGVAVEIVRDDDGKIHRGEIAETLKSVVTGETGEILRAKVREISKNLKSIRDEEMDAVAEELIQLCRNSNKSK

SEQ ID NO: 158 - protein, 442 aa, Artificial Sequence
  engineered beta-1,2-glycosyltransferase encoded in plasmid pA31285
MATNLRVLMFPWLAYGHISPFLNIAKQLADRGFLIYLCSTRINLESIIKKIPEKYADSIHLIELQLPELPELPPHYHTTNGLPPHLNPTLHKALKMSKPNFSRILQNLKPDLLIYDVLQPWAEHVANEQNIPAGKLLTSCAAVFSYFFSFRKNPGVEFPFPAIHLPEVEKVKIREILAKEPEEGGRLDEGNKQMMLMCTSRTIEAKYIDYCTELCNWKVVPVGPPFQDLITNDADNKELIDWLGTKHENSTVFVSFGSEYFLSKEDMEEVAFALELSNVNFIWVARFPKGEERNLEDALPKGFLERIGERGRVLDKFAPQPRILNHPSTGGFISHCGWNSAMESIDFGVPIIAMPIHNFQPINAKLMVELGVAVEIVRDDDGKIHRGEIAETLKSVVTGETGEILRAKVREISKNLKSIRDEEMDAVAEELIQLCRNSNKSK

SEQ ID NO: 159 - protein, 442 aa, Artificial Sequence
  engineered beta-1,2-glycosyltransferase encoded in plasmid pA31286
MATNLRVLMFPWLAYGHISPFLNIAKQLADRGFLIYLCSTRINLESIIKKIPEKYADSIHLIELQLPELPELPPHYHTTNGLPPHLNPTLHKALKMSKPNFSRILQNLKPDLLIYDVLQPWAEHVANEQNIPAGKLLTSCAAVFSYFFSFRKNPGVEFPFPAIHLPEVEKVKIREILAKEPEEGGRLDEGNKQMMLMCTSRTIEAKYIDYCTELCNWKVVPVGPPFQDLITNDADNKELIDWLGTKHENSTVFVSFGSEYFLSKEDMEEVAFALELSNVNFIWVARFPKGEERNLEDALPKGFLERIGERGRVLDKFAPQPRILNHPSTGGFISHCGWNSAMESIDFGVPIIAMPIHNYQPINAKLMVELGVAVEIVRDDDGKIHRGEIAETLKSVVTGETGEILRAKVREISKNLKSIRDEEMDAVAEELIQLCRNSNKSK

SEQ ID NO: 160 - protein, 442 aa, Artificial Sequence
  engineered beta-1,2-glycosyltransferase encoded in plasmid pA31287
MATNLRVLMFPWLAYGHISPFLNIAKQLADRGFLIYLCSTRINLESIIKKIPEKYADSIHLIELQLPELPELPPHYHTTNGLPPHLNPTLHKALKMSKPNFSRILQNLKPDLLIYDVLQPWAEHVANEQNIPAGKLLTSCAAVFSYFFSFRKNPGVEFPFPAIHLPEVEKVKIREILAKEPEEGGRLDEGNKQMMLMCTSRTIEAKYIDYCTELCNWKVVPVGPPFQDLITNDADNKELIDWLGTKHENSTVFVSFGSEYFLSKEDMEEVAFALELSNVNFIWVARFPKGEERNLEDALPKGFLERIGERGRVLDKFAPQPRILNHPSTGGFISHCGWNSAMESIDFGVPIIAMPIHNWQPINAKLMVELGVAVEIVRDDDGKIHRGEIAETLKSVVTGETGEILRAKVREISKNLKSIRDEEMDAVAEELIQLCRNSNKSK

SEQ ID NO: 161 - protein, 442 aa, Artificial Sequence
  engineered beta-1,2-glycosyltransferase encoded in plasmid pA31288
MATNLRVLMFPWLAYGHISPFLNIAKQLADRGFLIYLCSTRINLESIIKKIPEKYADSIHLIELQLPELPELPPHYHTTNGLPPHLNPTLHKALKMSKPNFSRILQNLKPDLLIYDVLQPWAEHVANEQNIPAGKLLTSCAAVFSYFFSFRKNPGVEFPFPAIHLPEVEKVKIREILAKEPEEGGRLDEGNKQMMLMCTSRTIEAKYIDYCTELCNWKVVPVGPPFQDLITNDADNKELIDWLGTKHENSTVFVSFGSEYFLSKEDMEEVAFALELSNVNFIWVARFPKGEERNLEDALPKGFLERIGERGRVLDKFAPQPRILNHPSTGGFISHCGWNSAMESIDFGVPIIAMPIHNHQPINAKLMVELGVAVEIVRDDDGKIHRGEIAETLKSVVTGETGEILRAKVREISKNLKSIRDEEMDAVAEELIQLCRNSNKSK

SEQ ID NO: 162 - protein, 442 aa, Artificial Sequence
  engineered beta-1,2-glycosyltransferase encoded in plasmid pA31289
MATNLRVLMFPWLAYGHISPFLNIAKQLADRGFLIYLCSTRINLESIIKKIPEKYADSIHLIELQLPELPELPPHYHTTNGLPPHLNPTLHKALKMSKPNFSRILQNLKPDLLIYDVLQPWAEHVANEQNIPAGKLLTSCAAVFSYFFSFRKNPGVEFPFPAIHLPEVEKVKIREILAKEPEEGGRLDEGNKQMMLMCTSRTIEAKYIDYCTELCNWKVVPVGPPFQDLITNDADNKELIDWLGTKHENSTVFVSFGSEYFLSKEDMEEVAFALELSNVNFIWVARFPKGEERNLEDALPKGFLERIGERGRVLDKFAPQPRILNHPSTGGFISHCGWNSAMESIDFGVPIIAMPIHNKQPINAKLMVELGVAVEIVRDDDGKIHRGEIAETLKSVVTGETGEILRAKVREISKNLKSIRDEEMDAVAEELIQLCRNSNKSK

SEQ ID NO: 163 - protein, 442 aa, Artificial Sequence
  engineered beta-1,2-glycosyltransferase encoded in plasmid pA31290
MATNLRVLMFPWLAYGHISPFLNIAKQLADRGFLIYLCSTRINLESIIKKIPEKYADSIHLIELQLPELPELPPHYHTTNGLPPHLNPTLHKALKMSKPNFSRILQNLKPDLLIYDVLQPWAEHVANEQNIPAGKLLTSCAAVFSYFFSFRKNPGVEFPFPAIHLPEVEKVKIREILAKEPEEGGRLDEGNKQMMLMCTSRTIEAKYIDYCTELCNWKVVPVGPPFQDLITNDADNKELIDWLGTKHENSTVFVSFGSEYFLSKEDMEEVAFALELSNVNFIWVARFPKGEERNLEDALPKGFLERIGERGRVLDKFAPQPRILNHPSTGGFISHCGWNSAMESIDFGVPIIAMPIHNRQPINAKLMVELGVAVEIVRDDDGKIHRGEIAETLKSVVTGETGEILRAKVREISKNLKSIRDEEMDAVAEELIQLCRNSNKSK

SEQ ID NO: 164 - protein, 442 aa, Artificial Sequence
  engineered beta-1,2-glycosyltransferase encoded in plasmid pA31291
MATNLRVLMFPWLAYGHISPFLNIAKQLADRGFLIYLCSTRINLESIIKKIPEKYADSIHLIELQLPELPELPPHYHTTNGLPPHLNPTLHKALKMSKPNFSRILQNLKPDLLIYDVLQPWAEHVANEQNIPAGKLLTSCAAVFSYFFSFRKNPGVEFPFPAIHLPEVEKVKIREILAKEPEEGGRLDEGNKQMMLMCTSRTIEAKYIDYCTELCNWKVVPVGPPFQDLITNDADNKELIDWLGTKHENSTVFVSFGSEYFLSKEDMEEVAFALELSNVNFIWVARFPKGEERNLEDALPKGFLERIGERGRVLDKFAPQPRILNHPSTGGFISHCGWNSAMESIDFGVPIIAMPIHNQQPINAKLMVELGVAVEIVRDDDGKIHRGEIAETLKSVVTGETGEILRAKVREISKNLKSIRDEEMDAVAEELIQLCRNSNKSK

SEQ ID NO: 165 - protein, 442 aa, Artificial Sequence
  engineered beta-1,2-glycosyltransferase encoded in plasmid pA31294
MATNLRVLMFPWLAYGHISPFLNIAKQLADRGFLIYLCSTRINLESIIKKIPEKYADSIHLIELQLPELPELPPHYHTTNGLPPHLNPTLHKALKMSKPNFSRILQNLKPDLLIYDVLQPWAEHVANEQNIPAGKLLTSCAAVFSYFFSFRKNPGVEFPFPAIHLPEVEKVKIREILAKEPEEGGRLDEGNKQMMLMCTSRTIEAKYIDYCTELCNWKVVPVGPPFQDLITNDADNKELIDWLGTKHENSTVFVSFGSEYFLSKEDMEEVAFALELSNVNFIWVARFPKGEERNLEDALPKGFLERIGERGRVLDKFAPQPRILNHPSTGGFISHCGWNSAMESIDFGVPIIAMPIHNSQPINAKLMVELGVAVEIVRDDDGKIHRGEIAETLKSVVTGETGEILRAKVREISKNLKSIRDEEMDAVAEELIQLCRNSNKSK

SEQ ID NO: 166 - protein, 442 aa, Artificial Sequence
  engineered beta-1,2-glycosyltransferase encoded in plasmid pA31297
MATNLRVLMFPWLAYGHISPFLNIAKQLADRGFLIYLCSTRINLESIIKKIPEKYADSIHLIELQLPELPELPPHYHTTNGLPPHLNPTLHKALKMSKPNFSRILQNLKPDLLIYDVLQPWAEHVANEQNIPAGKLLTSCAAVFSYFFSFRKNPGVEFPFPAIHLPEVEKVKIREILAKEPEEGGRLDEGNKQMMLMCTSRTIEAKYIDYCTELCNWKVVPVGPPFQDLITNDADNKELIDWLGTKHENSTVFVSFGSEYFLSKEDMEEVAFALELSNVNFIWVARFPKGEERNLEDALPKGFLERIGERGRVLDKFAPQPRILNHPSTGGFISHCGWNSAMESIDFGVPIIAMPIHNDPPINAKLMVELGVAVEIVRDDDGKIHRGEIAETLKSVVTGETGEILRAKVREISKNLKSIRDEEMDAVAEELIQLCRNSNKSK

SEQ ID NO: 167 - protein, 442 aa, Artificial Sequence
  engineered beta-1,2-glycosyltransferase encoded in plasmid pA31298
MATNLRVLMFPWLAYGHISPFLNIAKQLADRGFLIYLCSTRINLESIIKKIPEKYADSIHLIELQLPELPELPPHYHTTNGLPPHLNPTLHKALKMSKPNFSRILQNLKPDLLIYDVLQPWAEHVANEQNIPAGKLLTSCAAVFSYFFSFRKNPGVEFPFPAIHLPEVEKVKIREILAKEPEEGGRLDEGNKQMMLMCTSRTIEAKYIDYCTELCNWKVVPVGPPFQDLITNDADNKELIDWLGTKHENSTVFVSFGSEYFLSKEDMEEVAFALELSNVNFIWVARFPKGEERNLEDALPKGFLERIGERGRVLDKFAPQPRILNHPSTGGFISHCGWNSAMESIDFGVPIIAMPIHNDAPINAKLMVELGVAVEIVRDDDGKIHRGEIAETLKSVVTGETGEILRAKVREISKNLKSIRDEEMDAVAEELIQLCRNSNKSK

SEQ ID NO: 168 - protein, 442 aa, Artificial Sequence
  engineered beta-1,2-glycosyltransferase encoded in plasmid pA31300
MATNLRVLMFPWLAYGHISPFLNIAKQLADRGFLIYLCSTRINLESIIKKIPEKYADSIHLIELQLPELPELPPHYHTTNGLPPHLNPTLHKALKMSKPNFSRILQNLKPDLLIYDVLQPWAEHVANEQNIPAGKLLTSCAAVFSYFFSFRKNPGVEFPFPAIHLPEVEKVKIREILAKEPEEGGRLDEGNKQMMLMCTSRTIEAKYIDYCTELCNWKVVPVGPPFQDLITNDADNKELIDWLGTKHENSTVFVSFGSEYFLSKEDMEEVAFALELSNVNFIWVARFPKGEERNLEDALPKGFLERIGERGRVLDKFAPQPRILNHPSTGGFISHCGWNSAMESIDFGVPIIAMPIHNDLPINAKLMVELGVAVEIVRDDDGKIHRGEIAETLKSVVTGETGEILRAKVREISKNLKSIRDEEMDAVAEELIQLCRNSNKSK

SEQ ID NO: 169 - protein, 442 aa, Artificial Sequence
  engineered beta-1,2-glycosyltransferase encoded in plasmid pA31302
MATNLRVLMFPWLAYGHISPFLNIAKQLADRGFLIYLCSTRINLESIIKKIPEKYADSIHLIELQLPELPELPPHYHTTNGLPPHLNPTLHKALKMSKPNFSRILQNLKPDLLIYDVLQPWAEHVANEQNIPAGKLLTSCAAVFSYFFSFRKNPGVEFPFPAIHLPEVEKVKIREILAKEPEEGGRLDEGNKQMMLMCTSRTIEAKYIDYCTELCNWKVVPVGPPFQDLITNDADNKELIDWLGTKHENSTVFVSFGSEYFLSKEDMEEVAFALELSNVNFIWVARFPKGEERNLEDALPKGFLERIGERGRVLDKFAPQPRILNHPSTGGFISHCGWNSAMESIDFGVPIIAMPIHNDMPINAKLMVELGVAVEIVRDDDGKIHRGEIAETLKSVVTGETGEILRAKVREISKNLKSIRDEEMDAVAEELIQLCRNSNKSK

SEQ ID NO: 170 - protein, 442 aa, Artificial Sequence
  engineered beta-1,2-glycosyltransferase encoded in plasmid pA31303
MATNLRVLMFPWLAYGHISPFLNIAKQLADRGFLIYLCSTRINLESIIKKIPEKYADSIHLIELQLPELPELPPHYHTTNGLPPHLNPTLHKALKMSKPNFSRILQNLKPDLLIYDVLQPWAEHVANEQNIPAGKLLTSCAAVFSYFFSFRKNPGVEFPFPAIHLPEVEKVKIREILAKEPEEGGRLDEGNKQMMLMCTSRTIEAKYIDYCTELCNWKVVPVGPPFQDLITNDADNKELIDWLGTKHENSTVFVSFGSEYFLSKEDMEEVAFALELSNVNFIWVARFPKGEERNLEDALPKGFLERIGERGRVLDKFAPQPRILNHPSTGGFISHCGWNSAMESIDFGVPIIAMPIHNDCPINAKLMVELGVAVEIVRDDDGKIHRGEIAETLKSVVTGETGEILRAKVREISKNLKSIRDEEMDAVAEELIQLCRNSNKSK

SEQ ID NO: 171 - protein, 442 aa, Artificial Sequence
  engineered beta-1,2-glycosyltransferase encoded in plasmid pA31304
MATNLRVLMFPWLAYGHISPFLNIAKQLADRGFLIYLCSTRINLESIIKKIPEKYADSIHLIELQLPELPELPPHYHTTNGLPPHLNPTLHKALKMSKPNFSRILQNLKPDLLIYDVLQPWAEHVANEQNIPAGKLLTSCAAVFSYFFSFRKNPGVEFPFPAIHLPEVEKVKIREILAKEPEEGGRLDEGNKQMMLMCTSRTIEAKYIDYCTELCNWKVVPVGPPFQDLITNDADNKELIDWLGTKHENSTVFVSFGSEYFLSKEDMEEVAFALELSNVNFIWVARFPKGEERNLEDALPKGFLERIGERGRVLDKFAPQPRILNHPSTGGFISHCGWNSAMESIDFGVPIIAMPIHNDFPINAKLMVELGVAVEIVRDDDGKIHRGEIAETLKSVVTGETGEILRAKVREISKNLKSIRDEEMDAVAEELIQLCRNSNKSK

SEQ ID NO: 172 - protein, 442 aa, Artificial Sequence
  engineered beta-1,2-glycosyltransferase encoded in plasmid pA31305
MATNLRVLMFPWLAYGHISPFLNIAKQLADRGFLIYLCSTRINLESIIKKIPEKYADSIHLIELQLPELPELPPHYHTTNGLPPHLNPTLHKALKMSKPNFSRILQNLKPDLLIYDVLQPWAEHVANEQNIPAGKLLTSCAAVFSYFFSFRKNPGVEFPFPAIHLPEVEKVKIREILAKEPEEGGRLDEGNKQMMLMCTSRTIEAKYIDYCTELCNWKVVPVGPPFQDLITNDADNKELIDWLGTKHENSTVFVSFGSEYFLSKEDMEEVAFALELSNVNFIWVARFPKGEERNLEDALPKGFLERIGERGRVLDKFAPQPRILNHPSTGGFISHCGWNSAMESIDFGVPIIAMPIHNDYPINAKLMVELGVAVEIVRDDDGKIHRGEIAETLKSVVTGETGEILRAKVREISKNLKSIRDEEMDAVAEELIQLCRNSNKSK

SEQ ID NO: 173 - protein, 442 aa, Artificial Sequence
  engineered beta-1,2-glycosyltransferase encoded in plasmid pA31306
MATNLRVLMFPWLAYGHISPFLNIAKQLADRGFLIYLCSTRINLESIIKKIPEKYADSIHLIELQLPELPELPPHYHTTNGLPPHLNPTLHKALKMSKPNFSRILQNLKPDLLIYDVLQPWAEHVANEQNIPAGKLLTSCAAVFSYFFSFRKNPGVEFPFPAIHLPEVEKVKIREILAKEPEEGGRLDEGNKQMMLMCTSRTIEAKYIDYCTELCNWKVVPVGPPFQDLITNDADNKELIDWLGTKHENSTVFVSFGSEYFLSKEDMEEVAFALELSNVNFIWVARFPKGEERNLEDALPKGFLERIGERGRVLDKFAPQPRILNHPSTGGFISHCGWNSAMESIDFGVPIIAMPIHNDWPINAKLMVELGVAVEIVRDDDGKIHRGEIAETLKSVVTGETGEILRAKVREISKNLKSIRDEEMDAVAEELIQLCRNSNKSK

SEQ ID NO: 174 - protein, 442 aa, Artificial Sequence
  engineered beta-1,2-glycosyltransferase encoded in plasmid pA31307
MATNLRVLMFPWLAYGHISPFLNIAKQLADRGFLIYLCSTRINLESIIKKIPEKYADSIHLIELQLPELPELPPHYHTTNGLPPHLNPTLHKALKMSKPNFSRILQNLKPDLLIYDVLQPWAEHVANEQNIPAGKLLTSCAAVFSYFFSFRKNPGVEFPFPAIHLPEVEKVKIREILAKEPEEGGRLDEGNKQMMLMCTSRTIEAKYIDYCTELCNWKVVPVGPPFQDLITNDADNKELIDWLGTKHENSTVFVSFGSEYFLSKEDMEEVAFALELSNVNFIWVARFPKGEERNLEDALPKGFLERIGERGRVLDKFAPQPRILNHPSTGGFISHCGWNSAMESIDFGVPIIAMPIHNDHPINAKLMVELGVAVEIVRDDDGKIHRGEIAETLKSVVTGETGEILRAKVREISKNLKSIRDEEMDAVAEELIQLCRNSNKSK

SEQ ID NO: 175 - protein, 442 aa, Artificial Sequence
  engineered beta-1,2-glycosyltransferase encoded in plasmid pA31308
MATNLRVLMFPWLAYGHISPFLNIAKQLADRGFLIYLCSTRINLESIIKKIPEKYADSIHLIELQLPELPELPPHYHTTNGLPPHLNPTLHKALKMSKPNFSRILQNLKPDLLIYDVLQPWAEHVANEQNIPAGKLLTSCAAVFSYFFSFRKNPGVEFPFPAIHLPEVEKVKIREILAKEPEEGGRLDEGNKQMMLMCTSRTIEAKYIDYCTELCNWKVVPVGPPFQDLITNDADNKELIDWLGTKHENSTVFVSFGSEYFLSKEDMEEVAFALELSNVNFIWVARFPKGEERNLEDALPKGFLERIGERGRVLDKFAPQPRILNHPSTGGFISHCGWNSAMESIDFGVPIIAMPIHNDKPINAKLMVELGVAVEIVRDDDGKIHRGEIAETLKSVVTGETGEILRAKVREISKNLKSIRDEEMDAVAEELIQLCRNSNKSK

SEQ ID NO: 176 - protein, 442 aa, Artificial Sequence
  engineered beta-1,2-glycosyltransferase encoded in plasmid pA31309
MATNLRVLMFPWLAYGHISPFLNIAKQLADRGFLIYLCSTRINLESIIKKIPEKYADSIHLIELQLPELPELPPHYHTTNGLPPHLNPTLHKALKMSKPNFSRILQNLKPDLLIYDVLQPWAEHVANEQNIPAGKLLTSCAAVFSYFFSFRKNPGVEFPFPAIHLPEVEKVKIREILAKEPEEGGRLDEGNKQMMLMCTSRTIEAKYIDYCTELCNWKVVPVGPPFQDLITNDADNKELIDWLGTKHENSTVFVSFGSEYFLSKEDMEEVAFALELSNVNFIWVARFPKGEERNLEDALPKGFLERIGERGRVLDKFAPQPRILNHPSTGGFISHCGWNSAMESIDFGVPIIAMPIHNDRPINAKLMVELGVAVEIVRDDDGKIHRGEIAETLKSVVTGETGEILRAKVREISKNLKSIRDEEMDAVAEELIQLCRNSNKSK

SEQ ID NO: 177 - protein, 442 aa, Artificial Sequence
  engineered beta-1,2-glycosyltransferase encoded in plasmid pA31310
MATNLRVLMFPWLAYGHISPFLNIAKQLADRGFLIYLCSTRINLESIIKKIPEKYADSIHLIELQLPELPELPPHYHTTNGLPPHLNPTLHKALKMSKPNFSRILQNLKPDLLIYDVLQPWAEHVANEQNIPAGKLLTSCAAVFSYFFSFRKNPGVEFPFPAIHLPEVEKVKIREILAKEPEEGGRLDEGNKQMMLMCTSRTIEAKYIDYCTELCNWKVVPVGPPFQDLITNDADNKELIDWLGTKHENSTVFVSFGSEYFLSKEDMEEVAFALELSNVNFIWVARFPKGEERNLEDALPKGFLERIGERGRVLDKFAPQPRILNHPSTGGFISHCGWNSAMESIDFGVPIIAMPIHNDNPINAKLMVELGVAVEIVRDDDGKIHRGEIAETLKSVVTGETGEILRAKVREISKNLKSIRDEEMDAVAEELIQLCRNSNKSK

SEQ ID NO: 178 - protein, 442 aa, Artificial Sequence
  engineered beta-1,2-glycosyltransferase encoded in plasmid pA31311
MATNLRVLMFPWLAYGHISPFLNIAKQLADRGFLIYLCSTRINLESIIKKIPEKYADSIHLIELQLPELPELPPHYHTTNGLPPHLNPTLHKALKMSKPNFSRILQNLKPDLLIYDVLQPWAEHVANEQNIPAGKLLTSCAAVFSYFFSFRKNPGVEFPFPAIHLPEVEKVKIREILAKEPEEGGRLDEGNKQMMLMCTSRTIEAKYIDYCTELCNWKVVPVGPPFQDLITNDADNKELIDWLGTKHENSTVFVSFGSEYFLSKEDMEEVAFALELSNVNFIWVARFPKGEERNLEDALPKGFLERIGERGRVLDKFAPQPRILNHPSTGGFISHCGWNSAMESIDFGVPIIAMPIHNDEPINAKLMVELGVAVEIVRDDDGKIHRGEIAETLKSVVTGETGEILRAKVREISKNLKSIRDEEMDAVAEELIQLCRNSNKSK

SEQ ID NO: 179 - protein, 442 aa, Artificial Sequence
  engineered beta-1,2-glycosyltransferase encoded in plasmid pA31313
MATNLRVLMFPWLAYGHISPFLNIAKQLADRGFLIYLCSTRINLESIIKKIPEKYADSIHLIELQLPELPELPPHYHTTNGLPPHLNPTLHKALKMSKPNFSRILQNLKPDLLIYDVLQPWAEHVANEQNIPAGKLLTSCAAVFSYFFSFRKNPGVEFPFPAIHLPEVEKVKIREILAKEPEEGGRLDEGNKQMMLMCTSRTIEAKYIDYCTELCNWKVVPVGPPFQDLITNDADNKELIDWLGTKHENSTVFVSFGSEYFLSKEDMEEVAFALELSNVNFIWVARFPKGEERNLEDALPKGFLERIGERGRVLDKFAPQPRILNHPSTGGFISHCGWNSAMESIDFGVPIIAMPIHNDSPINAKLMVELGVAVEIVRDDDGKIHRGEIAETLKSVVTGETGEILRAKVREISKNLKSIRDEEMDAVAEELIQLCRNSNKSK

SEQ ID NO: 180 - protein, 442 aa, Artificial Sequence
  engineered beta-1,2-glycosyltransferase encoded in plasmid pA31336
MATNLRVLMFPWLAYGHISPFLNIAKQLADRGFLIYLCSTRINLESIIKKIPEKYADSIHLIELQLPELPELPPHYHTTNGLPPHLNPTLHKALKMSKPNFSRILQNLKPDLLIYDVLQPWAEHVANEQNIPAGKLLTSCAAVFSYFFSFRKNPGVEFPFPAIHLPEVEKVKIREILAKEPEEGGRLDEGNKQMMLMCTSRTIEAKYIDYCTELCNWKVVPVGPPFQDLITNDADNKELIDWLGTKHENSTVFVSFGSEYFLSKEDMEEVAFALELSNVNFIWVARFPKGEERNLEDALPKGFLERIGERGRVLDKFAPQPRILNHPSTGGFISHCGWNSAMESIDFGVPIIAMPIHNDQPANAKLMVELGVAVEIVRDDDGKIHRGEIAETLKSVVTGETGEILRAKVREISKNLKSIRDEEMDAVAEELIQLCRNSNKSK

SEQ ID NO: 181 - protein, 442 aa, Artificial Sequence
  engineered beta-1,2-glycosyltransferase encoded in plasmid pA31345
MATNLRVLMFPWLAYGHISPFLNIAKQLADRGFLIYLCSTRINLESIIKKIPEKYADSIHLIELQLPELPELPPHYHTTNGLPPHLNPTLHKALKMSKPNFSRILQNLKPDLLIYDVLQPWAEHVANEQNIPAGKLLTSCAAVFSYFFSFRKNPGVEFPFPAIHLPEVEKVKIREILAKEPEEGGRLDEGNKQMMLMCTSRTIEAKYIDYCTELCNWKVVPVGPPFQDLITNDADNKELIDWLGTKHENSTVFVSFGSEYFLSKEDMEEVAFALELSNVNFIWVARFPKGEERNLEDALPKGFLERIGERGRVLDKFAPQPRILNHPSTGGFISHCGWNSAMESIDFGVPIIAMPIHNDQPKNAKLMVELGVAVEIVRDDDGKIHRGEIAETLKSVVTGETGEILRAKVREISKNLKSIRDEEMDAVAEELIQLCRNSNKSK

SEQ ID NO: 182 - protein, 442 aa, Artificial Sequence
  engineered beta-1,2-glycosyltransferase encoded in plasmid pA31346
MATNLRVLMFPWLAYGHISPFLNIAKQLADRGFLIYLCSTRINLESIIKKIPEKYADSIHLIELQLPELPELPPHYHTTNGLPPHLNPTLHKALKMSKPNFSRILQNLKPDLLIYDVLQPWAEHVANEQNIPAGKLLTSCAAVFSYFFSFRKNPGVEFPFPAIHLPEVEKVKIREILAKEPEEGGRLDEGNKQMMLMCTSRTIEAKYIDYCTELCNWKVVPVGPPFQDLITNDADNKELIDWLGTKHENSTVFVSFGSEYFLSKEDMEEVAFALELSNVNFIWVARFPKGEERNLEDALPKGFLERIGERGRVLDKFAPQPRILNHPSTGGFISHCGWNSAMESIDFGVPIIAMPIHNDQPRNAKLMVELGVAVEIVRDDDGKIHRGEIAETLKSVVTGETGEILRAKVREISKNLKSIRDEEMDAVAEELIQLCRNSNKSK

SEQ ID NO: 183 - protein, 442 aa, Artificial Sequence
  engineered beta-1,2-glycosyltransferase encoded in plasmid pA31347
MATNLRVLMFPWLAYGHISPFLNIAKQLADRGFLIYLCSTRINLESIIKKIPEKYADSIHLIELQLPELPELPPHYHTTNGLPPHLNPTLHKALKMSKPNFSRILQNLKPDLLIYDVLQPWAEHVANEQNIPAGKLLTSCAAVFSYFFSFRKNPGVEFPFPAIHLPEVEKVKIREILAKEPEEGGRLDEGNKQMMLMCTSRTIEAKYIDYCTELCNWKVVPVGPPFQDLITNDADNKELIDWLGTKHENSTVFVSFGSEYFLSKEDMEEVAFALELSNVNFIWVARFPKGEERNLEDALPKGFLERIGERGRVLDKFAPQPRILNHPSTGGFISHCGWNSAMESIDFGVPIIAMPIHNDQPQNAKLMVELGVAVEIVRDDDGKIHRGEIAETLKSVVTGETGEILRAKVREISKNLKSIRDEEMDAVAEELIQLCRNSNKSK

SEQ ID NO: 184 - protein, 442 aa, Artificial Sequence
  engineered beta-1,2-glycosyltransferase encoded in plasmid pA31350
MATNLRVLMFPWLAYGHISPFLNIAKQLADRGFLIYLCSTRINLESIIKKIPEKYADSIHLIELQLPELPELPPHYHTTNGLPPHLNPTLHKALKMSKPNFSRILQNLKPDLLIYDVLQPWAEHVANEQNIPAGKLLTSCAAVFSYFFSFRKNPGVEFPFPAIHLPEVEKVKIREILAKEPEEGGRLDEGNKQMMLMCTSRTIEAKYIDYCTELCNWKVVPVGPPFQDLITNDADNKELIDWLGTKHENSTVFVSFGSEYFLSKEDMEEVAFALELSNVNFIWVARFPKGEERNLEDALPKGFLERIGERGRVLDKFAPQPRILNHPSTGGFISHCGWNSAMESIDFGVPIIAMPIHNDQPDNAKLMVELGVAVEIVRDDDGKIHRGEIAETLKSVVTGETGEILRAKVREISKNLKSIRDEEMDAVAEELIQLCRNSNKSK

SEQ ID NO: 185 - protein, 442 aa, Artificial Sequence
  engineered beta-1,2-glycosyltransferase encoded in plasmid pA31352
MATNLRVLMFPWLAYGHISPFLNIAKQLADRGFLIYLCSTRINLESIIKKIPEKYADSIHLIELQLPELPELPPHYHTTNGLPPHLNPTLHKALKMSKPNFSRILQNLKPDLLIYDVLQPWAEHVANEQNIPAGKLLTSCAAVFSYFFSFRKNPGVEFPFPAIHLPEVEKVKIREILAKEPEEGGRLDEGNKQMMLMCTSRTIEAKYIDYCTELCNWKVVPVGPPFQDLITNDADNKELIDWLGTKHENSTVFVSFGSEYFLSKEDMEEVAFALELSNVNFIWVARFPKGEERNLEDALPKGFLERIGERGRVLDKFAPQPRILNHPSTGGFISHCGWNSAMESIDFGVPIIAMPIHNDQPTNAKLMVELGVAVEIVRDDDGKIHRGEIAETLKSVVTGETGEILRAKVREISKNLKSIRDEEMDAVAEELIQLCRNSNKSK

SEQ ID NO: 186 - protein, 442 aa, Artificial Sequence
  engineered beta-1,2-glycosyltransferase encoded in plasmid pA31353
MATNLRVLMFPWLAYGHISPFLNIAKQLADRGFLIYLCSTRINLESIIKKIPEKYADSIHLIELQLPELPELPPHYHTTNGLPPHLNPTLHKALKMSKPNFSRILQNLKPDLLIYDVLQPWAEHVANEQNIPAGKLLTSCAAVFSYFFSFRKNPGVEFPFPAIHLPEVEKVKIREILAKEPEEGGRLDEGNKQMMLMCTSRTIEAKYIDYCTELCNWKVVPVGPPFQDLITNDADNKELIDWLGTKHENSTVFVSFGSEYFLSKEDMEEVAFALELSNVNFIWVARFPKGEERNLEDALPKGFLERIGERGRVLDKFAPQPRILNHPSTGGFISHCGWNSAMESIDFGVPIIAMPIHNDQPIGAKLMVELGVAVEIVRDDDGKIHRGEIAETLKSVVTGETGEILRAKVREISKNLKSIRDEEMDAVAEELIQLCRNSNKSK

SEQ ID NO: 187 - protein, 442 aa, Artificial Sequence
  engineered beta-1,2-glycosyltransferase encoded in plasmid pA31354
MATNLRVLMFPWLAYGHISPFLNIAKQLADRGFLIYLCSTRINLESIIKKIPEKYADSIHLIELQLPELPELPPHYHTTNGLPPHLNPTLHKALKMSKPNFSRILQNLKPDLLIYDVLQPWAEHVANEQNIPAGKLLTSCAAVFSYFFSFRKNPGVEFPFPAIHLPEVEKVKIREILAKEPEEGGRLDEGNKQMMLMCTSRTIEAKYIDYCTELCNWKVVPVGPPFQDLITNDADNKELIDWLGTKHENSTVFVSFGSEYFLSKEDMEEVAFALELSNVNFIWVARFPKGEERNLEDALPKGFLERIGERGRVLDKFAPQPRILNHPSTGGFISHCGWNSAMESIDFGVPIIAMPIHNDQPIPAKLMVELGVAVEIVRDDDGKIHRGEIAETLKSVVTGETGEILRAKVREISKNLKSIRDEEMDAVAEELIQLCRNSNKSK

SEQ ID NO: 188 - protein, 442 aa, Artificial Sequence
  engineered beta-1,2-glycosyltransferase encoded in plasmid pA31355
MATNLRVLMFPWLAYGHISPFLNIAKQLADRGFLIYLCSTRINLESIIKKIPEKYADSIHLIELQLPELPELPPHYHTTNGLPPHLNPTLHKALKMSKPNFSRILQNLKPDLLIYDVLQPWAEHVANEQNIPAGKLLTSCAAVFSYFFSFRKNPGVEFPFPAIHLPEVEKVKIREILAKEPEEGGRLDEGNKQMMLMCTSRTIEAKYIDYCTELCNWKVVPVGPPFQDLITNDADNKELIDWLGTKHENSTVFVSFGSEYFLSKEDMEEVAFALELSNVNFIWVARFPKGEERNLEDALPKGFLERIGERGRVLDKFAPQPRILNHPSTGGFISHCGWNSAMESIDFGVPIIAMPIHNDQPIAAKLMVELGVAVEIVRDDDGKIHRGEIAETLKSVVTGETGEILRAKVREISKNLKSIRDEEMDAVAEELIQLCRNSNKSK

SEQ ID NO: 189 - protein, 442 aa, Artificial Sequence
  engineered beta-1,2-glycosyltransferase encoded in plasmid pA31356
MATNLRVLMFPWLAYGHISPFLNIAKQLADRGFLIYLCSTRINLESIIKKIPEKYADSIHLIELQLPELPELPPHYHTTNGLPPHLNPTLHKALKMSKPNFSRILQNLKPDLLIYDVLQPWAEHVANEQNIPAGKLLTSCAAVFSYFFSFRKNPGVEFPFPAIHLPEVEKVKIREILAKEPEEGGRLDEGNKQMMLMCTSRTIEAKYIDYCTELCNWKVVPVGPPFQDLITNDADNKELIDWLGTKHENSTVFVSFGSEYFLSKEDMEEVAFALELSNVNFIWVARFPKGEERNLEDALPKGFLERIGERGRVLDKFAPQPRILNHPSTGGFISHCGWNSAMESIDFGVPIIAMPIHNDQPIVAKLMVELGVAVEIVRDDDGKIHRGEIAETLKSVVTGETGEILRAKVREISKNLKSIRDEEMDAVAEELIQLCRNSNKSK

SEQ ID NO: 190 - protein, 442 aa, Artificial Sequence
  engineered beta-1,2-glycosyltransferase encoded in plasmid pA31358
MATNLRVLMFPWLAYGHISPFLNIAKQLADRGFLIYLCSTRINLESIIKKIPEKYADSIHLIELQLPELPELPPHYHTTNGLPPHLNPTLHKALKMSKPNFSRILQNLKPDLLIYDVLQPWAEHVANEQNIPAGKLLTSCAAVFSYFFSFRKNPGVEFPFPAIHLPEVEKVKIREILAKEPEEGGRLDEGNKQMMLMCTSRTIEAKYIDYCTELCNWKVVPVGPPFQDLITNDADNKELIDWLGTKHENSTVFVSFGSEYFLSKEDMEEVAFALELSNVNFIWVARFPKGEERNLEDALPKGFLERIGERGRVLDKFAPQPRILNHPSTGGFISHCGWNSAMESIDFGVPIIAMPIHNDQPIIAKLMVELGVAVEIVRDDDGKIHRGEIAETLKSVVTGETGEILRAKVREISKNLKSIRDEEMDAVAEELIQLCRNSNKSK

SEQ ID NO: 191 - protein, 442 aa, Artificial Sequence
  engineered beta-1,2-glycosyltransferase encoded in plasmid pA31360
MATNLRVLMFPWLAYGHISPFLNIAKQLADRGFLIYLCSTRINLESIIKKIPEKYADSIHLIELQLPELPELPPHYHTTNGLPPHLNPTLHKALKMSKPNFSRILQNLKPDLLIYDVLQPWAEHVANEQNIPAGKLLTSCAAVFSYFFSFRKNPGVEFPFPAIHLPEVEKVKIREILAKEPEEGGRLDEGNKQMMLMCTSRTIEAKYIDYCTELCNWKVVPVGPPFQDLITNDADNKELIDWLGTKHENSTVFVSFGSEYFLSKEDMEEVAFALELSNVNFIWVARFPKGEERNLEDALPKGFLERIGERGRVLDKFAPQPRILNHPSTGGFISHCGWNSAMESIDFGVPIIAMPIHNDQPICAKLMVELGVAVEIVRDDDGKIHRGEIAETLKSVVTGETGEILRAKVREISKNLKSIRDEEMDAVAEELIQLCRNSNKSK

SEQ ID NO: 192 - protein, 442 aa, Artificial Sequence
  engineered beta-1,2-glycosyltransferase encoded in plasmid pA31362
MATNLRVLMFPWLAYGHISPFLNIAKQLADRGFLIYLCSTRINLESIIKKIPEKYADSIHLIELQLPELPELPPHYHTTNGLPPHLNPTLHKALKMSKPNFSRILQNLKPDLLIYDVLQPWAEHVANEQNIPAGKLLTSCAAVFSYFFSFRKNPGVEFPFPAIHLPEVEKVKIREILAKEPEEGGRLDEGNKQMMLMCTSRTIEAKYIDYCTELCNWKVVPVGPPFQDLITNDADNKELIDWLGTKHENSTVFVSFGSEYFLSKEDMEEVAFALELSNVNFIWVARFPKGEERNLEDALPKGFLERIGERGRVLDKFAPQPRILNHPSTGGFISHCGWNSAMESIDFGVPIIAMPIHNDQPIYAKLMVELGVAVEIVRDDDGKIHRGEIAETLKSVVTGETGEILRAKVREISKNLKSIRDEEMDAVAEELIQLCRNSNKSK

SEQ ID NO: 193 - protein, 442 aa, Artificial Sequence
  engineered beta-1,2-glycosyltransferase encoded in plasmid pA31364
MATNLRVLMFPWLAYGHISPFLNIAKQLADRGFLIYLCSTRINLESIIKKIPEKYADSIHLIELQLPELPELPPHYHTTNGLPPHLNPTLHKALKMSKPNFSRILQNLKPDLLIYDVLQPWAEHVANEQNIPAGKLLTSCAAVFSYFFSFRKNPGVEFPFPAIHLPEVEKVKIREILAKEPEEGGRLDEGNKQMMLMCTSRTIEAKYIDYCTELCNWKVVPVGPPFQDLITNDADNKELIDWLGTKHENSTVFVSFGSEYFLSKEDMEEVAFALELSNVNFIWVARFPKGEERNLEDALPKGFLERIGERGRVLDKFAPQPRILNHPSTGGFISHCGWNSAMESIDFGVPIIAMPIHNDQPIHAKLMVELGVAVEIVRDDDGKIHRGEIAETLKSVVTGETGEILRAKVREISKNLKSIRDEEMDAVAEELIQLCRNSNKSK

SEQ ID NO: 194 - protein, 442 aa, Artificial Sequence
  engineered beta-1,2-glycosyltransferase encoded in plasmid pA31366
MATNLRVLMFPWLAYGHISPFLNIAKQLADRGFLIYLCSTRINLESIIKKIPEKYADSIHLIELQLPELPELPPHYHTTNGLPPHLNPTLHKALKMSKPNFSRILQNLKPDLLIYDVLQPWAEHVANEQNIPAGKLLTSCAAVFSYFFSFRKNPGVEFPFPAIHLPEVEKVKIREILAKEPEEGGRLDEGNKQMMLMCTSRTIEAKYIDYCTELCNWKVVPVGPPFQDLITNDADNKELIDWLGTKHENSTVFVSFGSEYFLSKEDMEEVAFALELSNVNFIWVARFPKGEERNLEDALPKGFLERIGERGRVLDKFAPQPRILNHPSTGGFISHCGWNSAMESIDFGVPIIAMPIHNDQPIRAKLMVELGVAVEIVRDDDGKIHRGEIAETLKSVVTGETGEILRAKVREISKNLKSIRDEEMDAVAEELIQLCRNSNKSK

SEQ ID NO: 195 - protein, 442 aa, Artificial Sequence
  engineered beta-1,2-glycosyltransferase encoded in plasmid pA31367
MATNLRVLMFPWLAYGHISPFLNIAKQLADRGFLIYLCSTRINLESIIKKIPEKYADSIHLIELQLPELPELPPHYHTTNGLPPHLNPTLHKALKMSKPNFSRILQNLKPDLLIYDVLQPWAEHVANEQNIPAGKLLTSCAAVFSYFFSFRKNPGVEFPFPAIHLPEVEKVKIREILAKEPEEGGRLDEGNKQMMLMCTSRTIEAKYIDYCTELCNWKVVPVGPPFQDLITNDADNKELIDWLGTKHENSTVFVSFGSEYFLSKEDMEEVAFALELSNVNFIWVARFPKGEERNLEDALPKGFLERIGERGRVLDKFAPQPRILNHPSTGGFISHCGWNSAMESIDFGVPIIAMPIHNDQPIQAKLMVELGVAVEIVRDDDGKIHRGEIAETLKSVVTGETGEILRAKVREISKNLKSIRDEEMDAVAEELIQLCRNSNKSK

SEQ ID NO: 196 - protein, 442 aa, Artificial Sequence
  engineered beta-1,2-glycosyltransferase encoded in plasmid pA31368
MATNLRVLMFPWLAYGHISPFLNIAKQLADRGFLIYLCSTRINLESIIKKIPEKYADSIHLIELQLPELPELPPHYHTTNGLPPHLNPTLHKALKMSKPNFSRILQNLKPDLLIYDVLQPWAEHVANEQNIPAGKLLTSCAAVFSYFFSFRKNPGVEFPFPAIHLPEVEKVKIREILAKEPEEGGRLDEGNKQMMLMCTSRTIEAKYIDYCTELCNWKVVPVGPPFQDLITNDADNKELIDWLGTKHENSTVFVSFGSEYFLSKEDMEEVAFALELSNVNFIWVARFPKGEERNLEDALPKGFLERIGERGRVLDKFAPQPRILNHPSTGGFISHCGWNSAMESIDFGVPIIAMPIHNDQPIEAKLMVELGVAVEIVRDDDGKIHRGEIAETLKSVVTGETGEILRAKVREISKNLKSIRDEEMDAVAEELIQLCRNSNKSK

SEQ ID NO: 197 - protein, 442 aa, Artificial Sequence
  engineered beta-1,2-glycosyltransferase encoded in plasmid pA31369
MATNLRVLMFPWLAYGHISPFLNIAKQLADRGFLIYLCSTRINLESIIKKIPEKYADSIHLIELQLPELPELPPHYHTTNGLPPHLNPTLHKALKMSKPNFSRILQNLKPDLLIYDVLQPWAEHVANEQNIPAGKLLTSCAAVFSYFFSFRKNPGVEFPFPAIHLPEVEKVKIREILAKEPEEGGRLDEGNKQMMLMCTSRTIEAKYIDYCTELCNWKVVPVGPPFQDLITNDADNKELIDWLGTKHENSTVFVSFGSEYFLSKEDMEEVAFALELSNVNFIWVARFPKGEERNLEDALPKGFLERIGERGRVLDKFAPQPRILNHPSTGGFISHCGWNSAMESIDFGVPIIAMPIHNDQPIDAKLMVELGVAVEIVRDDDGKIHRGEIAETLKSVVTGETGEILRAKVREISKNLKSIRDEEMDAVAEELIQLCRNSNKSK

SEQ ID NO: 198 - protein, 442 aa, Artificial Sequence
  engineered beta-1,2-glycosyltransferase encoded in plasmid pA31505
MATNLRVLMFPWLAYGHISPFLNIAKQLADRGFLIYLCSTRINLESIIKKIPEKYADSIHLIELQLPELPELPPHYHTTNGLPPHLNPTLHKALKMSKPNFSRILQNLKPDLLIYDVLQPWAEHVANEQNIPAGKLLTSCAAVFSYFFSFRKNPGVEFPFPAIHLPEVEKVKIREILAKEPEEGPRLDEGNKQMMLMCTSRTIEAKYIDYCTELCNWKVVPVGPPFQDLITNDADNKELIDWLGTKHENSTVFVSFGSEYFLSKEDMEEVAFALELSNVNFIWVARFPKGEERNLEDALPKGFLERIGERGRVLDKFAPQPRILNHPSTGGFISHCGWNSAMESIDFGVPIIAMPIHNDQPINAKLMVELGVAVEIVRDDDGKIHRGEIAETLKSVVTGETGEILRAKVREISKNLKSIRDEEMDAVAEELIQLCRNSNKSK

SEQ ID NO: 199 - protein, 442 aa, Artificial Sequence
  engineered beta-1,2-glycosyltransferase encoded in plasmid pA31506
MATNLRVLMFPWLAYGHISPFLNIAKQLADRGFLIYLCSTRINLESIIKKIPEKYADSIHLIELQLPELPELPPHYHTTNGLPPHLNPTLHKALKMSKPNFSRILQNLKPDLLIYDVLQPWAEHVANEQNIPAGKLLTSCAAVFSYFFSFRKNPGVEFPFPAIHLPEVEKVKIREILAKEPEEGARLDEGNKQMMLMCTSRTIEAKYIDYCTELCNWKVVPVGPPFQDLITNDADNKELIDWLGTKHENSTVFVSFGSEYFLSKEDMEEVAFALELSNVNFIWVARFPKGEERNLEDALPKGFLERIGERGRVLDKFAPQPRILNHPSTGGFISHCGWNSAMESIDFGVPIIAMPIHNDQPINAKLMVELGVAVEIVRDDDGKIHRGEIAETLKSVVTGETGEILRAKVREISKNLKSIRDEEMDAVAEELIQLCRNSNKSK

SEQ ID NO: 200 - protein, 442 aa, Artificial Sequence
  engineered beta-1,2-glycosyltransferase encoded in plasmid pA31507
MATNLRVLMFPWLAYGHISPFLNIAKQLADRGFLIYLCSTRINLESIIKKIPEKYADSIHLIELQLPELPELPPHYHTTNGLPPHLNPTLHKALKMSKPNFSRILQNLKPDLLIYDVLQPWAEHVANEQNIPAGKLLTSCAAVFSYFFSFRKNPGVEFPFPAIHLPEVEKVKIREILAKEPEEGVRLDEGNKQMMLMCTSRTIEAKYIDYCTELCNWKVVPVGPPFQDLITNDADNKELIDWLGTKHENSTVFVSFGSEYFLSKEDMEEVAFALELSNVNFIWVARFPKGEERNLEDALPKGFLERIGERGRVLDKFAPQPRILNHPSTGGFISHCGWNSAMESIDFGVPIIAMPIHNDQPINAKLMVELGVAVEIVRDDDGKIHRGEIAETLKSVVTGETGEILRAKVREISKNLKSIRDEEMDAVAEELIQLCRNSNKSK

SEQ ID NO: 201 - protein, 442 aa, Artificial Sequence
  engineered beta-1,2-glycosyltransferase encoded in plasmid pA31508
MATNLRVLMFPWLAYGHISPFLNIAKQLADRGFLIYLCSTRINLESIIKKIPEKYADSIHLIELQLPELPELPPHYHTTNGLPPHLNPTLHKALKMSKPNFSRILQNLKPDLLIYDVLQPWAEHVANEQNIPAGKLLTSCAAVFSYFFSFRKNPGVEFPFPAIHLPEVEKVKIREILAKEPEEGLRLDEGNKQMMLMCTSRTIEAKYIDYCTELCNWKVVPVGPPFQDLITNDADNKELIDWLGTKHENSTVFVSFGSEYFLSKEDMEEVAFALELSNVNFIWVARFPKGEERNLEDALPKGFLERIGERGRVLDKFAPQPRILNHPSTGGFISHCGWNSAMESIDFGVPIIAMPIHNDQPINAKLMVELGVAVEIVRDDDGKIHRGEIAETLKSVVTGETGEILRAKVREISKNLKSIRDEEMDAVAEELIQLCRNSNKSK

SEQ ID NO: 202 - protein, 442 aa, Artificial Sequence
  engineered beta-1,2-glycosyltransferase encoded in plasmid pA31509
MATNLRVLMFPWLAYGHISPFLNIAKQLADRGFLIYLCSTRINLESIIKKIPEKYADSIHLIELQLPELPELPPHYHTTNGLPPHLNPTLHKALKMSKPNFSRILQNLKPDLLIYDVLQPWAEHVANEQNIPAGKLLTSCAAVFSYFFSFRKNPGVEFPFPAIHLPEVEKVKIREILAKEPEEGIRLDEGNKQMMLMCTSRTIEAKYIDYCTELCNWKVVPVGPPFQDLITNDADNKELIDWLGTKHENSTVFVSFGSEYFLSKEDMEEVAFALELSNVNFIWVARFPKGEERNLEDALPKGFLERIGERGRVLDKFAPQPRILNHPSTGGFISHCGWNSAMESIDFGVPIIAMPIHNDQPINAKLMVELGVAVEIVRDDDGKIHRGEIAETLKSVVTGETGEILRAKVREISKNLKSIRDEEMDAVAEELIQLCRNSNKSK

SEQ ID NO: 203 - protein, 442 aa, Artificial Sequence
  engineered beta-1,2-glycosyltransferase encoded in plasmid pA31510
MATNLRVLMFPWLAYGHISPFLNIAKQLADRGFLIYLCSTRINLESIIKKIPEKYADSIHLIELQLPELPELPPHYHTTNGLPPHLNPTLHKALKMSKPNFSRILQNLKPDLLIYDVLQPWAEHVANEQNIPAGKLLTSCAAVFSYFFSFRKNPGVEFPFPAIHLPEVEKVKIREILAKEPEEGMRLDEGNKQMMLMCTSRTIEAKYIDYCTELCNWKVVPVGPPFQDLITNDADNKELIDWLGTKHENSTVFVSFGSEYFLSKEDMEEVAFALELSNVNFIWVARFPKGEERNLEDALPKGFLERIGERGRVLDKFAPQPRILNHPSTGGFISHCGWNSAMESIDFGVPIIAMPIHNDQPINAKLMVELGVAVEIVRDDDGKIHRGEIAETLKSVVTGETGEILRAKVREISKNLKSIRDEEMDAVAEELIQLCRNSNKSK

SEQ ID NO: 204 - protein, 442 aa, Artificial Sequence
  engineered beta-1,2-glycosyltransferase encoded in plasmid pA31511
MATNLRVLMFPWLAYGHISPFLNIAKQLADRGFLIYLCSTRINLESIIKKIPEKYADSIHLIELQLPELPELPPHYHTTNGLPPHLNPTLHKALKMSKPNFSRILQNLKPDLLIYDVLQPWAEHVANEQNIPAGKLLTSCAAVFSYFFSFRKNPGVEFPFPAIHLPEVEKVKIREILAKEPEEGCRLDEGNKQMMLMCTSRTIEAKYIDYCTELCNWKVVPVGPPFQDLITNDADNKELIDWLGTKHENSTVFVSFGSEYFLSKEDMEEVAFALELSNVNFIWVARFPKGEERNLEDALPKGFLERIGERGRVLDKFAPQPRILNHPSTGGFISHCGWNSAMESIDFGVPIIAMPIHNDQPINAKLMVELGVAVEIVRDDDGKIHRGEIAETLKSVVTGETGEILRAKVREISKNLKSIRDEEMDAVAEELIQLCRNSNKSK

SEQ ID NO: 205 - protein, 442 aa, Artificial Sequence
  engineered beta-1,2-glycosyltransferase encoded in plasmid pA31512
MATNLRVLMFPWLAYGHISPFLNIAKQLADRGFLIYLCSTRINLESIIKKIPEKYADSIHLIELQLPELPELPPHYHTTNGLPPHLNPTLHKALKMSKPNFSRILQNLKPDLLIYDVLQPWAEHVANEQNIPAGKLLTSCAAVFSYFFSFRKNPGVEFPFPAIHLPEVEKVKIREILAKEPEEGFRLDEGNKQMMLMCTSRTIEAKYIDYCTELCNWKVVPVGPPFQDLITNDADNKELIDWLGTKHENSTVFVSFGSEYFLSKEDMEEVAFALELSNVNFIWVARFPKGEERNLEDALPKGFLERIGERGRVLDKFAPQPRILNHPSTGGFISHCGWNSAMESIDFGVPIIAMPIHNDQPINAKLMVELGVAVEIVRDDDGKIHRGEIAETLKSVVTGETGEILRAKVREISKNLKSIRDEEMDAVAEELIQLCRNSNKSK

SEQ ID NO: 206 - protein, 442 aa, Artificial Sequence
  engineered beta-1,2-glycosyltransferase encoded in plasmid pA31513
MATNLRVLMFPWLAYGHISPFLNIAKQLADRGFLIYLCSTRINLESIIKKIPEKYADSIHLIELQLPELPELPPHYHTTNGLPPHLNPTLHKALKMSKPNFSRILQNLKPDLLIYDVLQPWAEHVANEQNIPAGKLLTSCAAVFSYFFSFRKNPGVEFPFPAIHLPEVEKVKIREILAKEPEEGYRLDEGNKQMMLMCTSRTIEAKYIDYCTELCNWKVVPVGPPFQDLITNDADNKELIDWLGTKHENSTVFVSFGSEYFLSKEDMEEVAFALELSNVNFIWVARFPKGEERNLEDALPKGFLERIGERGRVLDKFAPQPRILNHPSTGGFISHCGWNSAMESIDFGVPIIAMPIHNDQPINAKLMVELGVAVEIVRDDDGKIHRGEIAETLKSVVTGETGEILRAKVREISKNLKSIRDEEMDAVAEELIQLCRNSNKSK

SEQ ID NO: 207 - protein, 442 aa, Artificial Sequence
  engineered beta-1,2-glycosyltransferase encoded in plasmid pA31515
MATNLRVLMFPWLAYGHISPFLNIAKQLADRGFLIYLCSTRINLESIIKKIPEKYADSIHLIELQLPELPELPPHYHTTNGLPPHLNPTLHKALKMSKPNFSRILQNLKPDLLIYDVLQPWAEHVANEQNIPAGKLLTSCAAVFSYFFSFRKNPGVEFPFPAIHLPEVEKVKIREILAKEPEEGHRLDEGNKQMMLMCTSRTIEAKYIDYCTELCNWKVVPVGPPFQDLITNDADNKELIDWLGTKHENSTVFVSFGSEYFLSKEDMEEVAFALELSNVNFIWVARFPKGEERNLEDALPKGFLERIGERGRVLDKFAPQPRILNHPSTGGFISHCGWNSAMESIDFGVPIIAMPIHNDQPINAKLMVELGVAVEIVRDDDGKIHRGEIAETLKSVVTGETGEILRAKVREISKNLKSIRDEEMDAVAEELIQLCRNSNKSK

SEQ ID NO: 208 - protein, 442 aa, Artificial Sequence
  engineered beta-1,2-glycosyltransferase encoded in plasmid pA31516
MATNLRVLMFPWLAYGHISPFLNIAKQLADRGFLIYLCSTRINLESIIKKIPEKYADSIHLIELQLPELPELPPHYHTTNGLPPHLNPTLHKALKMSKPNFSRILQNLKPDLLIYDVLQPWAEHVANEQNIPAGKLLTSCAAVFSYFFSFRKNPGVEFPFPAIHLPEVEKVKIREILAKEPEEGKRLDEGNKQMMLMCTSRTIEAKYIDYCTELCNWKVVPVGPPFQDLITNDADNKELIDWLGTKHENSTVFVSFGSEYFLSKEDMEEVAFALELSNVNFIWVARFPKGEERNLEDALPKGFLERIGERGRVLDKFAPQPRILNHPSTGGFISHCGWNSAMESIDFGVPIIAMPIHNDQPINAKLMVELGVAVEIVRDDDGKIHRGEIAETLKSVVTGETGEILRAKVREISKNLKSIRDEEMDAVAEELIQLCRNSNKSK

SEQ ID NO: 209 - protein, 442 aa, Artificial Sequence
  engineered beta-1,2-glycosyltransferase encoded in plasmid pA31517
MATNLRVLMFPWLAYGHISPFLNIAKQLADRGFLIYLCSTRINLESIIKKIPEKYADSIHLIELQLPELPELPPHYHTTNGLPPHLNPTLHKALKMSKPNFSRILQNLKPDLLIYDVLQPWAEHVANEQNIPAGKLLTSCAAVFSYFFSFRKNPGVEFPFPAIHLPEVEKVKIREILAKEPEEGRRLDEGNKQMMLMCTSRTIEAKYIDYCTELCNWKVVPVGPPFQDLITNDADNKELIDWLGTKHENSTVFVSFGSEYFLSKEDMEEVAFALELSNVNFIWVARFPKGEERNLEDALPKGFLERIGERGRVLDKFAPQPRILNHPSTGGFISHCGWNSAMESIDFGVPIIAMPIHNDQPINAKLMVELGVAVEIVRDDDGKIHRGEIAETLKSVVTGETGEILRAKVREISKNLKSIRDEEMDAVAEELIQLCRNSNKSK

SEQ ID NO: 210 - protein, 442 aa, Artificial Sequence
  engineered beta-1,2-glycosyltransferase encoded in plasmid pA31518
MATNLRVLMFPWLAYGHISPFLNIAKQLADRGFLIYLCSTRINLESIIKKIPEKYADSIHLIELQLPELPELPPHYHTTNGLPPHLNPTLHKALKMSKPNFSRILQNLKPDLLIYDVLQPWAEHVANEQNIPAGKLLTSCAAVFSYFFSFRKNPGVEFPFPAIHLPEVEKVKIREILAKEPEEGQRLDEGNKQMMLMCTSRTIEAKYIDYCTELCNWKVVPVGPPFQDLITNDADNKELIDWLGTKHENSTVFVSFGSEYFLSKEDMEEVAFALELSNVNFIWVARFPKGEERNLEDALPKGFLERIGERGRVLDKFAPQPRILNHPSTGGFISHCGWNSAMESIDFGVPIIAMPIHNDQPINAKLMVELGVAVEIVRDDDGKIHRGEIAETLKSVVTGETGEILRAKVREISKNLKSIRDEEMDAVAEELIQLCRNSNKSK

SEQ ID NO: 211 - protein, 442 aa, Artificial Sequence
  engineered beta-1,2-glycosyltransferase encoded in plasmid pA31519
MATNLRVLMFPWLAYGHISPFLNIAKQLADRGFLIYLCSTRINLESIIKKIPEKYADSIHLIELQLPELPELPPHYHTTNGLPPHLNPTLHKALKMSKPNFSRILQNLKPDLLIYDVLQPWAEHVANEQNIPAGKLLTSCAAVFSYFFSFRKNPGVEFPFPAIHLPEVEKVKIREILAKEPEEGNRLDEGNKQMMLMCTSRTIEAKYIDYCTELCNWKVVPVGPPFQDLITNDADNKELIDWLGTKHENSTVFVSFGSEYFLSKEDMEEVAFALELSNVNFIWVARFPKGEERNLEDALPKGFLERIGERGRVLDKFAPQPRILNHPSTGGFISHCGWNSAMESIDFGVPIIAMPIHNDQPINAKLMVELGVAVEIVRDDDGKIHRGEIAETLKSVVTGETGEILRAKVREISKNLKSIRDEEMDAVAEELIQLCRNSNKSK

SEQ ID NO: 212 - protein, 442 aa, Artificial Sequence
  engineered beta-1,2-glycosyltransferase encoded in plasmid pA31520
MATNLRVLMFPWLAYGHISPFLNIAKQLADRGFLIYLCSTRINLESIIKKIPEKYADSIHLIELQLPELPELPPHYHTTNGLPPHLNPTLHKALKMSKPNFSRILQNLKPDLLIYDVLQPWAEHVANEQNIPAGKLLTSCAAVFSYFFSFRKNPGVEFPFPAIHLPEVEKVKIREILAKEPEEGERLDEGNKQMMLMCTSRTIEAKYIDYCTELCNWKVVPVGPPFQDLITNDADNKELIDWLGTKHENSTVFVSFGSEYFLSKEDMEEVAFALELSNVNFIWVARFPKGEERNLEDALPKGFLERIGERGRVLDKFAPQPRILNHPSTGGFISHCGWNSAMESIDFGVPIIAMPIHNDQPINAKLMVELGVAVEIVRDDDGKIHRGEIAETLKSVVTGETGEILRAKVREISKNLKSIRDEEMDAVAEELIQLCRNSNKSK

SEQ ID NO: 213 - protein, 442 aa, Artificial Sequence
  engineered beta-1,2-glycosyltransferase encoded in plasmid pA31521
MATNLRVLMFPWLAYGHISPFLNIAKQLADRGFLIYLCSTRINLESIIKKIPEKYADSIHLIELQLPELPELPPHYHTTNGLPPHLNPTLHKALKMSKPNFSRILQNLKPDLLIYDVLQPWAEHVANEQNIPAGKLLTSCAAVFSYFFSFRKNPGVEFPFPAIHLPEVEKVKIREILAKEPEEGDRLDEGNKQMMLMCTSRTIEAKYIDYCTELCNWKVVPVGPPFQDLITNDADNKELIDWLGTKHENSTVFVSFGSEYFLSKEDMEEVAFALELSNVNFIWVARFPKGEERNLEDALPKGFLERIGERGRVLDKFAPQPRILNHPSTGGFISHCGWNSAMESIDFGVPIIAMPIHNDQPINAKLMVELGVAVEIVRDDDGKIHRGEIAETLKSVVTGETGEILRAKVREISKNLKSIRDEEMDAVAEELIQLCRNSNKSK

SEQ ID NO: 214 - protein, 442 aa, Artificial Sequence
  engineered beta-1,2-glycosyltransferase encoded in plasmid pA31522
MATNLRVLMFPWLAYGHISPFLNIAKQLADRGFLIYLCSTRINLESIIKKIPEKYADSIHLIELQLPELPELPPHYHTTNGLPPHLNPTLHKALKMSKPNFSRILQNLKPDLLIYDVLQPWAEHVANEQNIPAGKLLTSCAAVFSYFFSFRKNPGVEFPFPAIHLPEVEKVKIREILAKEPEEGSRLDEGNKQMMLMCTSRTIEAKYIDYCTELCNWKVVPVGPPFQDLITNDADNKELIDWLGTKHENSTVFVSFGSEYFLSKEDMEEVAFALELSNVNFIWVARFPKGEERNLEDALPKGFLERIGERGRVLDKFAPQPRILNHPSTGGFISHCGWNSAMESIDFGVPIIAMPIHNDQPINAKLMVELGVAVEIVRDDDGKIHRGEIAETLKSVVTGETGEILRAKVREISKNLKSIRDEEMDAVAEELIQLCRNSNKSK

SEQ ID NO: 215 - protein, 442 aa, Artificial Sequence
  engineered beta-1,2-glycosyltransferase encoded in plasmid pA31523
MATNLRVLMFPWLAYGHISPFLNIAKQLADRGFLIYLCSTRINLESIIKKIPEKYADSIHLIELQLPELPELPPHYHTTNGLPPHLNPTLHKALKMSKPNFSRILQNLKPDLLIYDVLQPWAEHVANEQNIPAGKLLTSCAAVFSYFFSFRKNPGVEFPFPAIHLPEVEKVKIREILAKEPEEGTRLDEGNKQMMLMCTSRTIEAKYIDYCTELCNWKVVPVGPPFQDLITNDADNKELIDWLGTKHENSTVFVSFGSEYFLSKEDMEEVAFALELSNVNFIWVARFPKGEERNLEDALPKGFLERIGERGRVLDKFAPQPRILNHPSTGGFISHCGWNSAMESIDFGVPIIAMPIHNDQPINAKLMVELGVAVEIVRDDDGKIHRGEIAETLKSVVTGETGEILRAKVREISKNLKSIRDEEMDAVAEELIQLCRNSNKSK

SEQ ID NO: 216 - protein, 442 aa, Artificial Sequence
  engineered beta-1,2-glycosyltransferase encoded in plasmid pA31545
MATNLRVLMFPWLAYGHISPFLNIAKQLADRGFLIYLCSTRINLESIIKKIPEKYADSIHLIELQLPELPELPPHYHTTNGLPPHLNPTLHKALKMSKPNFSRILQNLKPDLLIYDVLQPWAEHVANEQNIPAGKLLTSCAAVFSYFFSFRKNPGVEFPFPAIHLPEVEKVKIREILVKEPEEGGRLDEGNKQMMLMCTSRTIEAKYIDYCTELCNWKVVPVGPPFQDLITNDADNKELIDWLGTKHENSTVFVSFGSEYFLSKEDMEEVAFALELSNVNFIWVARFPKGEERNLEDALPKGFLERIGERGRVLDKFAPQPRILNHPSTGGFISHCGWNSAMESIDFGVPIIAMPIHNDQPINAKLMVELGVAVEIVRDDDGKIHRGEIAETLKSVVTGETGEILRAKVREISKNLKSIRDEEMDAVAEELIQLCRNSNKSK

SEQ ID NO: 217 - protein, 442 aa, Artificial Sequence
  engineered beta-1,2-glycosyltransferase encoded in plasmid pA31548
MATNLRVLMFPWLAYGHISPFLNIAKQLADRGFLIYLCSTRINLESIIKKIPEKYADSIHLIELQLPELPELPPHYHTTNGLPPHLNPTLHKALKMSKPNFSRILQNLKPDLLIYDVLQPWAEHVANEQNIPAGKLLTSCAAVFSYFFSFRKNPGVEFPFPAIHLPEVEKVKIREILMKEPEEGGRLDEGNKQMMLMCTSRTIEAKYIDYCTELCNWKVVPVGPPFQDLITNDADNKELIDWLGTKHENSTVFVSFGSEYFLSKEDMEEVAFALELSNVNFIWVARFPKGEERNLEDALPKGFLERIGERGRVLDKFAPQPRILNHPSTGGFISHCGWNSAMESIDFGVPIIAMPIHNDQPINAKLMVELGVAVEIVRDDDGKIHRGEIAETLKSVVTGETGEILRAKVREISKNLKSIRDEEMDAVAEELIQLCRNSNKSK

SEQ ID NO: 218 - protein, 442 aa, Artificial Sequence
  engineered beta-1,2-glycosyltransferase encoded in plasmid pA31549
MATNLRVLMFPWLAYGHISPFLNIAKQLADRGFLIYLCSTRINLESIIKKIPEKYADSIHLIELQLPELPELPPHYHTTNGLPPHLNPTLHKALKMSKPNFSRILQNLKPDLLIYDVLQPWAEHVANEQNIPAGKLLTSCAAVFSYFFSFRKNPGVEFPFPAIHLPEVEKVKIREILCKEPEEGGRLDEGNKQMMLMCTSRTIEAKYIDYCTELCNWKVVPVGPPFQDLITNDADNKELIDWLGTKHENSTVFVSFGSEYFLSKEDMEEVAFALELSNVNFIWVARFPKGEERNLEDALPKGFLERIGERGRVLDKFAPQPRILNHPSTGGFISHCGWNSAMESIDFGVPIIAMPIHNDQPINAKLMVELGVAVEIVRDDDGKIHRGEIAETLKSVVTGETGEILRAKVREISKNLKSIRDEEMDAVAEELIQLCRNSNKSK

SEQ ID NO: 219 - protein, 442 aa, Artificial Sequence
  engineered beta-1,2-glycosyltransferase encoded in plasmid pA31558
MATNLRVLMFPWLAYGHISPFLNIAKQLADRGFLIYLCSTRINLESIIKKIPEKYADSIHLIELQLPELPELPPHYHTTNGLPPHLNPTLHKALKMSKPNFSRILQNLKPDLLIYDVLQPWAEHVANEQNIPAGKLLTSCAAVFSYFFSFRKNPGVEFPFPAIHLPEVEKVKIREILEKEPEEGGRLDEGNKQMMLMCTSRTIEAKYIDYCTELCNWKVVPVGPPFQDLITNDADNKELIDWLGTKHENSTVFVSFGSEYFLSKEDMEEVAFALELSNVNFIWVARFPKGEERNLEDALPKGFLERIGERGRVLDKFAPQPRILNHPSTGGFISHCGWNSAMESIDFGVPIIAMPIHNDQPINAKLMVELGVAVEIVRDDDGKIHRGEIAETLKSVVTGETGEILRAKVREISKNLKSIRDEEMDAVAEELIQLCRNSNKSK

SEQ ID NO: 220 - protein, 442 aa, Artificial Sequence
  engineered beta-1,2-glycosyltransferase encoded in plasmid pA31559
MATNLRVLMFPWLAYGHISPFLNIAKQLADRGFLIYLCSTRINLESIIKKIPEKYADSIHLIELQLPELPELPPHYHTTNGLPPHLNPTLHKALKMSKPNFSRILQNLKPDLLIYDVLQPWAEHVANEQNIPAGKLLTSCAAVFSYFFSFRKNPGVEFPFPAIHLPEVEKVKIREILDKEPEEGGRLDEGNKQMMLMCTSRTIEAKYIDYCTELCNWKVVPVGPPFQDLITNDADNKELIDWLGTKHENSTVFVSFGSEYFLSKEDMEEVAFALELSNVNFIWVARFPKGEERNLEDALPKGFLERIGERGRVLDKFAPQPRILNHPSTGGFISHCGWNSAMESIDFGVPIIAMPIHNDQPINAKLMVELGVAVEIVRDDDGKIHRGEIAETLKSVVTGETGEILRAKVREISKNLKSIRDEEMDAVAEELIQLCRNSNKSK

SEQ ID NO: 221 - protein, 442 aa, Artificial Sequence
  engineered beta-1,2-glycosyltransferase encoded in plasmid pA31560
MATNLRVLMFPWLAYGHISPFLNIAKQLADRGFLIYLCSTRINLESIIKKIPEKYADSIHLIELQLPELPELPPHYHTTNGLPPHLNPTLHKALKMSKPNFSRILQNLKPDLLIYDVLQPWAEHVANEQNIPAGKLLTSCAAVFSYFFSFRKNPGVEFPFPAIHLPEVEKVKIREILSKEPEEGGRLDEGNKQMMLMCTSRTIEAKYIDYCTELCNWKVVPVGPPFQDLITNDADNKELIDWLGTKHENSTVFVSFGSEYFLSKEDMEEVAFALELSNVNFIWVARFPKGEERNLEDALPKGFLERIGERGRVLDKFAPQPRILNHPSTGGFISHCGWNSAMESIDFGVPIIAMPIHNDQPINAKLMVELGVAVEIVRDDDGKIHRGEIAETLKSVVTGETGEILRAKVREISKNLKSIRDEEMDAVAEELIQLCRNSNKSK

SEQ ID NO: 222 - protein, 442 aa, Artificial Sequence
  engineered beta-1,2-glycosyltransferase encoded in plasmid pA31561
MATNLRVLMFPWLAYGHISPFLNIAKQLADRGFLIYLCSTRINLESIIKKIPEKYADSIHLIELQLPELPELPPHYHTTNGLPPHLNPTLHKALKMSKPNFSRILQNLKPDLLIYDVLQPWAEHVANEQNIPAGKLLTSCAAVFSYFFSFRKNPGVEFPFPAIHLPEVEKVKIREILTKEPEEGGRLDEGNKQMMLMCTSRTIEAKYIDYCTELCNWKVVPVGPPFQDLITNDADNKELIDWLGTKHENSTVFVSFGSEYFLSKEDMEEVAFALELSNVNFIWVARFPKGEERNLEDALPKGFLERIGERGRVLDKFAPQPRILNHPSTGGFISHCGWNSAMESIDFGVPIIAMPIHNDQPINAKLMVELGVAVEIVRDDDGKIHRGEIAETLKSVVTGETGEILRAKVREISKNLKSIRDEEMDAVAEELIQLCRNSNKSK

SEQ ID NO: 223 - protein, 442 aa, Artificial Sequence
  engineered beta-1,2-glycosyltransferase encoded in plasmid pA29916
MATNLRVLMFPWLAYGHISPFLNIAKKLADRGFLIYLCSTRINFESIRKKIPEKYAQSIHLIELQLPELPELPPHYHTTNGLPPHLNPTLHKALKMSKPNFSNILQNLKPDLLIYDVLQPWAEEVANEQNIPAAKLLTSSAAVFSYFFHFRKNPGVEFPFPAIYLPDYEKRKIREKLAKEPEEKGRQNECNCQMMLMCTSREIEAKYIDYCSELCNWKVVPVGPLFQDPITNDDDDLELIEWLKKKDENSVVFVSFGSEYFLSKEDMEELAHALELSNVNFIWVARFPKGEETNLEDALPKGFLERIKERGRVLEKFAPQPRILAHPSTGGFISHCGWNSAMESIQFGVPIIAMPIHNDQPINAKLMVELGVAVEIVRDDDGKFHREEIAEAIKKVVTGETGEKLRKKVREISKKLKSERDEEMDEVAEELIQLCRNSNKSK

SEQ ID NO: 224 - protein, 442 aa, Artificial Sequence
  engineered beta-1,2-glycosyltransferase encoded in plasmid pA29917
MATNLRVLMFPWLAYGHISPFLNIAKKLADRGFLIYLCSTRINFESIQKKIPEKYAKSIHLIELQLPELPELPPHYHTTNGLPPHLNPTLHKALKMSKPNFSRILQNLKPDLLIYDVLQPWAEEVANEQNIPAAKLLTSSAAVFSYFFHFRKNPGVEFPFPAIYLPDYEKRKIREELAKEPEEKGRQDECNKQMMLMCTSRTIEAKYIDYCSELCNWKVVPVGPPFQDPITNDDDNHELIEWLKKKDENSVVFVSFGSEYFLSKEDMEEVAFALELSNVNFIWVIRFPKGEETNLEDALPKGFLERIKERGRVLEKFAPQPRILAHPSTGGFISHCGWNSAMESIQFGVPIIAMPIHNDQPINAKLMVELGVAVEIVRDDDGKFHREEIAETIKKVVTGETGEILRAKVREISKNLKSIRDEEMDEVAEELIQLCRNSNKSK

SEQ ID NO: 225 - protein, 442 aa, Artificial Sequence
  engineered beta-1,2-glycosyltransferase encoded in plasmid pA29918
MATNLRVLMFPWLAYGHISPFLNIAKQLADRGFLIYLCSTRINLESIIKKIPEKYADSIHLIELQLPELPELPPHYHTTNGLPPHLNPTLHKALKMSKPNFSRILQNLKPDLLIYDVLQPWAEHVANEQNIPAAKLLTSCAAVFSYFFHFRKNPGVEFPFPAIHLPEVEKVKIREILAKEPEEGGRLDECNKQMMLMCTSRTIEAKYIDYCTELCNWKVVPVGPPFQDPITNDDDNKELIDWLGTKHENSVVFVSFGSEYFLSKEDMEEVAFALELSNVNFIWVIRFPKGEERNLEDALPKGFLERIGERGRVLDKFAPQPRILNHPSTGGFISHCGWNSAMESIQFGVPIIAMPIHNDQPINAKLMVELGVAVEIVRDDDGKIHRGEIAETLKSVVTGETGEILRAKVREISKNLKSIRDEEMDAVAEELIQLCRNSNKSK

SEQ ID NO: 226 - protein, 442 aa, Artificial Sequence
  engineered beta-1,2-glycosyltransferase encoded in plasmid pA29919
MATNLRVLMFPWLAYGHISPFLNIAKQLADRGFLIYLCSTRINLESIQKKIPEKYADSIHLIELQLPELPELPPHYHTTNGLPPHLNPTLHKALKMSKPNFSRILQNLKPDLLIYDVLQPWAEEVANEQNIPAAKLLTSCAAVFSYFFSFRKNPGVEFPFPAIHLPEVEKRKIREELAKEPEEGGRLDECNKQMMLMCTSRTIEAKYIDYCTELCNWKVVPVGPPFQDPITNDDDNHELIDWLGTKDENSVVFVSFGSEYFLSKEDMEEVAFALELSNVNFIWVIRFPKGEETNLEDALPKGFLERIGERGRVLDKFAPQPRILAHPSTGGFISHCGWNSAMESIQFGVPIIAMPIHNDQPINAKLMVELGVAVEIVRDDDGKIHRGEIAETIKSVVTGETGEILRAKVRELSKNLKSIRDEEMDEVAEELIQLCRNSNKSK

SEQ ID NO: 227 - protein, 442 aa, Artificial Sequence
  engineered beta-1,2-glycosyltransferase encoded in plasmid pA29920
MATNLRVLMFPWLAYGHISPFLNIAKKLADRGFLIYLCSTRINLESIKKKIPEKYADSIQLIELHLPELPELPPHYHTTNGLPPHLNPTLHKALQMAKPNFSRILKNLKPDLLIYDVLQPWAEHVANEQNIPAAMLLTSCAAVFSYFFHFFKNPGVEFPFPAIYLPEYEKQKIREVLANVPEEEGRLNECNKQMMLMCTSREIEAKYIDYCSELCNKKVIPVGPPFQDSITNDEDDKELIDWLDKKDENSVVFVSFGSEYFLSKEDMEEVAHALELSNVNFIWVARFPKGEELNLEDALPKGFLERIKDRGRVLEKFAPQPRILAHPSTGGFISHCGWNSAMESLQFGVPIIAMPIHNDQPINAKLMVELGVAVEIVRDDDGKIHREEIAKTLKKVVTGETGEKLRRKAREISEKLKSRRDEEMDQVVEELIQLCRNSNKSK

SEQ ID NO: 228 - protein, 442 aa, Artificial Sequence
  engineered beta-1,2-glycosyltransferase encoded in plasmid pA29921
MATNLRVLMFPWLAYGHISPFLNIAKKLADRGFLIYLCSTRINLESIKKKIPEKYADSIHLIELQLPELPELPPHYHTTNGLPPHLNPTLHKALKMAKPNFSRILQNLKPDLLIYDVLQPWAEHVANEQNIPAAMLLTSCAAVFSYFFHFRKNPGVEFPFPAIYLPEYEKVKIREILAKEPEEGGRLLECNKQMMLMCTSREIEAKYIDYCSELCNKKVVPVGPPFQDPITNDADDKELIDWLGTKDENSVVFVSFGSEYFLSKEDMEEVAFALELSNVNFIWVARFPKGEERNLEDALPKGFLERIGERGRVLDKFAPQPRILAHPSTGGFISHCGWNSAMESLQFGVPIIAMPIHNDQPINAKLMVELGVAVEIVRDDDGKIHREEIAETLKSVVTGETGEILRAKVREISKNLKSRRDEEMDAVAEELIQLCRNSNKSK

SEQ ID NO: 229 - protein, 442 aa, Artificial Sequence
  engineered beta-1,2-glycosyltransferase encoded in plasmid pA29922
MATNLRVLMFPWLAYGHISPFLNIAKQLADRGFLIYLCSTRINLESIKKKIPEKYADSIHLIELQLPELPELPPHYHTTNGLPPHLNPTLHKALKMSKPNFSRILQNLKPDLLIYDVLQPWAEHVANEQNIPAAMLLTSCAAVFSYFFHFRKNPGVEFPFPAIHLPEVEKVKIREILAKEPEEGGRLDECNKQMMLMCTSREIEAKYIDYCTELCNKKVVPVGPPFQDLITNDADDKELIDWLGTKHENSVVFVSFGSEYFLSKEDMEEVAFALELSNVNFIWVARFPKGEERNLEDALPKGFLERIGERGRVLDKFAPQPRILNHPSTGGFISHCGWNSAMESIYFGVPIIAMPIHNDQPINAKLMVELGVAVEIVRDDDGKIHRGEIAETLKSVVTGETGEILRAKVREISKNLKSRRDEEMDAVAEELIQLCRNSNKSK

SEQ ID NO: 230 - protein, 442 aa, Artificial Sequence
  engineered beta-1,2-glycosyltransferase encoded in plasmid pA29923
MATNLRVLMFPWLAYGHISPFLNIAKKLADRGFLIYLCSTRINLESIKKKIPEKYADSIHLIELQLPELPELPPHYHTTNGLPPHLNPTLHKALQMAKPNFSRILQNLKPDLLIYDVLQPWAEHVANEQNIPAAMLLTSCAAVFSYFFHFFKNPGVEFPFPAIYLPEYEKQKIREILAKEPEEEGRLNECNKQMMLMCTSREIEAKYIDYCSELCNKKVVPVGPPFQDSITNDEDDKELIDWLDKKDENSVVFVSFGSEYFLSKEDMEEVAKALELSNVNFIWVARFPKGEERNLEDALPKGFLERIGERGRVLEKFAPQPRILAHPSTGGFISHCGWNSAMESLQFGVPIIAMPIHNDQPINAKLMVELGVAVEIVRDDDGKIHREEIAETLKRVVTGETGEILRRKAREISKNLKSRRDEEMDAVVEELIQLCRNSNKSK

SEQ ID NO: 231 - protein, 442 aa, Artificial Sequence
  engineered beta-1,2-glycosyltransferase encoded in plasmid pA29924
MATNLRVLMFPWLAYGHISPFLNIAKQLADRGFHIYLCSTRINLESIKKKIPEKYARSIHLIELQLPELPELPPHYHTTNGLPPHLNPTLHKALKMSKPNFSNILQNLKPDLLIYDVLQPWAEEVANEQNIPAGKLLTSSAAVFSYFFSFRKNPGVEFPFPEIHLPDVEKRKIREILAKLPEEKGRLLEGNKQMMLMCTSREIEAKYIDYCSELCNWKVVPVGPPFQDLPTNDDEDKELIQWLDKKDEHSVVFVSFGSEYFLSKEDMEEVAHALELSNVNFIWVARFPKGEETNLEEALPKGFLERIKDRGVVLEKFAPQPRILAHPSTGGFISHCGWNSAMESIHFGVPIIAMPIHNDQPINAKLMVELGVAVEIVRDDDGKIHREEIAEVLKSVVTGETGEELRRKVREMSKKLKSKRDEEMDEVAEKLIQLCRNSNKSK

SEQ ID NO: 232 - protein, 442 aa, Artificial Sequence
  engineered beta-1,2-glycosyltransferase encoded in plasmid pA29925
MATNLRVLMFPWLAYGHISPFLNIAKQLADRGFRIYLCSTRINLESIKKKIPEKYARSIHLIELQLPELPELPPHYHTTNGLPPHLNPTLHKALKMSKPNFSNILQNLKPDLLIYDVLQPWAEEVANEQNIPAGKLLTSSAAVFSYFFSFRKNPGVEFPFPAIHLPDVEKRKIREILAKEPEEKGRLDEGNKQMMLMCTSRTIEAKYIDYCSELCNWKVVPVGPPFQDLPTNDDEDKELIQWLDKKDENSVVFVSFGSEYFLSKEDMEEVAHALELSNVNFIWVARFPKGEETNLEDALPKGFLERIGERGRVLEKFAPQPRILAHPSTGGFISHCGWNSAMESIHFGVPIIAMPIHNDQPINAKLMVELGVAVEIVRDDDGKIHREEIAEVLKSVVTGETGEELRRKVREISKKLKSKRDEEMDAVAEELIQLCRNSNKSK

SEQ ID NO: 233 - protein, 442 aa, Artificial Sequence
  engineered beta-1,2-glycosyltransferase encoded in plasmid pA29926
MATNLRVLMFPWLAYGHISPFLNIAKQLADRGFRIYLCSTRINLESIKKKIPEKYADSIHLIELQLPELPELPPHYHTTNGLPPHLNPTLHKALKMSKPNFSRILQNLKPDLLIYDVLQPWAEEVANEQNIPAGKLLTSCAAVFSYFFSFRKNPGVEFPFPAIHLPEVEKVKIREILAKEPEEGGRLDEGNKQMMLMCTSRTIEAKYIDYCSELCNWKVVPVGPPFQDLPTNDDENKELIDWLDTKHENSVVFVSFGSEYFLSKEDMEEVAFALELSNVNFIWVARFPKGEETNLEDALPKGFLERIGERGRVLDKFAPQPRILNHPSTGGFISHCGWNSAMESIHFGVPIIAMPIHNDQPINAKLMVELGVAVEIVRDDDGKIHREEIAETLKSVVTGETGEILRAKVREISKNLKSKRDEEMDAVAEELIQLCRNSNKSK

SEQ ID NO: 234 - protein, 442 aa, Artificial Sequence
  engineered beta-1,2-glycosyltransferase encoded in plasmid pA29927
MATNLRVLMFPWLAYGHISPFLNIAKQLADRGFHIYLCSTRINLESIKKKIPEKYARSIHLIELQLPELPELPPHYHTTNGLPPHLNPTLHKALKMSKPNFSNILQNLKPDLLIYDVLQPWAEEVANEQNIPAGKLLTSSAAVFSYFFSFRKNPGVEFPFPAIHLPDVEKRKIREILAKEPEEKGRLDEGNKQMMLMCTSRTIEAKYIDYCSELCNWKVVPVGPPFQDLITNDDDDKELMQWLDKKDENSVVFVSFGSEYFLSKEDMEEVAHALELSNVNFIWVARFPKGEETNLEDALPKGFLERIGERGVVLEKFAPQPRILAHPSTGGFISHCGWNSAMESIHFGVPIIAMPIHNDQPINAKLMVELGVAVEIVRDDDGKIHREEIAEVLKSVVTGETGEELRKKVREISKKLKSKRDEEMDAVAEELIQLCRNSNKSK

SEQ ID NO: 235 - protein, 442 aa, Artificial Sequence
  engineered beta-1,2-glycosyltransferase encoded in plasmid pA29928
MATNLRVLMFPWLAYGHISPFLNIAKQLADRGFHIYLCSTRINLESIKKKIPEKYADSIHLIELQLPELPELPPHYHTTNGLPPHLNPTLHKALKMSKPNFSRILQNLKPDLLIYDVLQPWAEEVANEQNIPAGKLLTSCAAVFSYFFSFRKNPGVEFPFPAIHLPEVEKVKIREILAKEPEEGGRLDEGNKQMMLMCTSRTIEAKYIDYCSELCNWKVVPVGPPFQDLPTNDDDNKELIDWLDTKHENSVVFVSFGSEYFLSKEDMEEVAFALELSNVNFIWVARFPKGEETNLEDALPKGFLERIGERGRVLDKFAPQPRILNHPSTGGFISHCGWNSAMESIHFGVPIIAMPIHNDQPINAKLMVELGVAVEIVRDDDGKIHREEIAETLKSVVTGETGEILRAKVREISKNLKSKRDEEMDAVAEELIQLCRNSNKSK

SEQ ID NO: 236 - protein, 442 aa, Artificial Sequence
  engineered beta-1,2-glycosyltransferase encoded in plasmid pA29929
MATNLRVLMFPWLAYGHISPFLNIAKQLADRGFHIYLCSTRINLESIKKKIPEKYARSIHLIELQLPELPELPPHYHTTNGLPPHLNPTLHKALKMSKPNFSNILQNLKPDLLIYDVLQPWAEEVANEQNIPAGKLLTSSAAVFSYFFSFRKNPGVEFPFPEIHLPDVEKRKIREILAKLPEEKGRLLEGNKQMMLMCTSREIEAKYIDYCSELCNWKVVPVGPPFQDLITNDDDDKELMQWLDKKDEHSVVFVSFGSEYFLSKEDMEEVAHALELSNVNFIWVARFPKGEETNLEEALPKGFLERIKDRGRVLEKFAPQPRILAHPSTGGFISHCGWNSAMESIHFGVPIIAMPIHNDQPINAKLMVELGVAVEIVRDDDGKIHREEIAEVLKSVVTGETGEKLRRKVREMSKKLKSKRDEEMDEVAEKLIQLCRNSNKSK

SEQ ID NO: 237 - protein, 442 aa, Artificial Sequence
  engineered beta-1,2-glycosyltransferase encoded in plasmid pA29930
MATNLRVLMFPWLAYGHISPFLNIAKQLADRGFRIYLCSTRINLESIKKKIPEKYADSIHLIELQLPELPELPPHYHTTNGLPPHLNPTLHKALKMSKPNFSRILQNLKPDLLIYDVLQPWAEEVANEQNIPAGKLLTSCAAVFSYFFSFRKNPGVEFPFPAIHLPEVEKRKIREILAKEPEEGGRLDEGNKQMMLMCTSRTIEAKYIDYCSELCNWKVVPVGPPFQDLPTNDDENKELIQWLDTKDENSVVFVSFGSEYFLSKEDMEEVAHALELSNVNFIWVARFPKGEETNLEDALPKGFLERIGERGRVLDKFAPQPRILAHPSTGGFISHCGWNSAMESIHFGVPIIAMPIHNDQPINAKLMVELGVAVEIVRDDDGKIHREEIAETLKSVVTGETGEILRRKVREISKNLKSKRDEEMDAVAEELIQLCRNSNKSK

SEQ ID NO: 238 - protein, 442 aa, Artificial Sequence
  engineered beta-1,2-glycosyltransferase encoded in plasmid pA29931
MATNLRVLMFPWLAYGHISPFLNLAKQLANRGFLIYLCSTRINLESIKQKIPEKYADSIHLVELQLPELPELPPHYHTTNGLPPHLNPTLHKALKMSKPNFSNILQNHKPDLLIYDVLQPWAEEVANEQNIPAAKLLTSPAAVFSFFFHFRKNPGVEFPFPDIHLPEHEKVKIREILAKEPEEGGRLNECNKQMMLMCTSREIEAKYIDYCSELCNWKVVPVGPPFQDPITNDDDDKELIKWLDKKDENSVVFVSFGSEYFLSKEDMEEMAHALELSNVNFIWVARFPKGEERNLEEALPKGFLERIKDRGMVLDKFAPQPRILAHPSTGGFISHCGWNSAMESIQFGVPIIAMPIHNDQPINAKLMVELGVAVEIRRDDDGKIHREEIAETLKRVVTGETGEELRRKVRELSEKLKSIRDEEMNQVAEELIQLCRNSNKSK

SEQ ID NO: 239 - protein, 442 aa, Artificial Sequence
  engineered beta-1,2-glycosyltransferase encoded in plasmid pA29932
MATNLRVLMFPWLAYGHISPFLNLAKQLADRGFLIYLCSTRVNLESIKHKIPEKYADSIHLIELQLPELPELPPHYHTTNGLPPHLNPTLHKALKMSKPNFSKILQNLKPDLLIYDVLQPWAEEVANEQNIPAAKLLTSPAAVFSFFFHFRKNPGVEFPFPEIHLPEMEKVKIREILAKEPEEGGRLDECNKQFMLMCTSREIEAKYIDYCSELCNWKVVPVGPPFQDLITNDDDNKELIKWLDKKDENSVVFVSFGSEYFLSKEDMEEIAFALELSNVNFIWVARFPKGEERNLEDALPKGFLERIGERGMVLDKFAPQPRILAHPSTGGFISHCGWNSAMESIQFGVPIIAMPIHNDQPINAKLMVELGVAVEIRRDDDGKIHREEIAETLKKVVTGETGEILRRKVREISKKLKSIRDEEMDAVAEELIQLCRNSNKSK

SEQ ID NO: 240 - protein, 442 aa, Artificial Sequence
  engineered beta-1,2-glycosyltransferase encoded in plasmid pA29933
MATNLRVLMFPWLAYGHISPFLNLAKQLADRGFLIYLCSTRINLESIIKKIPEKYADSIHLIELQLPELPELPPHYHTTNGLPPHLNPTLHKALKMSKPNFSRILQNLKPDLLIYDVLQPWAEEVANEQNIPAGKLLTSCAAVFSYFFHFRKNPGVEFPFPAIHLPEVEKVKIREILAKEPEEGGRLFECNKQMMLMCTSRTIEAKYIDYCTELCNWKVVPVGPPFQDLITNDDDNKELIDWLNTKHENSVVFVSFGSEYFLSKEDMEEIAFALELSNVNFIWVARFPKGEERNLEDALPKGFLERIGERGRVLDKFAPQPRILNHPSTGGFISHCGWNSAMESIQFGVPIIAMPIHNDQPINAKLMVELGVAVEIVRDDDGKIHREEIAETLKSVVTGETGEILRAKVREISKKLKSIRDEEMDAVAEELIQLCRNSNKSK

SEQ ID NO: 241 - protein, 442 aa, Artificial Sequence
  engineered beta-1,2-glycosyltransferase encoded in plasmid pA29934
MATNLRVLMFPWLAYGHISPFLNLAKQLADRGFLIYLCSTRVNLESIIKKIPEKYADSIHLIELQLPELPELPPHYHTTNGLPPHLNPTLHKALKMSKPNFSRILQNLKPDLLIYDVLQPWAEEVANEQNIPAAKLLTSPAAVFSYFFHFRKNPGVEFPFPEIHLPEMEKVKIREILAKEPEEGGRLFECNKQFMLMCTSRTIEAKYIDYCSELCNWKVVPVGPPFQDLITNDDDNKELIKWLDTKDENSVVFVSFGSEYFLSKEDMEEIAFALELSNVNFIWVARFPKGEERNLEDALPKGFLERIGERGRVLDKFAPQPRILNHPSTGGFISHCGWNSAMESIQFGVPIIAMPIHNDQPINAKLMVELGVAVEIVRDDDGKIHREEIAETLKKVVTGETGEILRRKVREISKKLKSIRDEEMDAVAEELIQLCRNSNKSK

SEQ ID NO: 242 - protein, 442 aa, Artificial Sequence
  engineered beta-1,2-glycosyltransferase encoded in plasmid pA29935
MATNLRVLMFPWLAYGHISPFLNLAKQLANRGFLIYLCSTRINLNSIKHKIPEKYADSIHLVELQLPELPELPPHYHTTNGLPPHLNPTLHKALKMSKPNFSNILQNHKPDLLIYDVLQPWAEEVANEQNIPAAKLLTSPAAVFSFFFHFRKNPGVEFPFPTIHLPEHEKVKIREILAKEPEEGGRLNECNKQFMLMCTSREIEAKYIDYCSELCNWKVVPVGPLFQDPITNDDDDKELIKWLDKKDENSVVFVSFGSEYFLSKEDMEEMAHALELSNVNFIWVARFPKGEERNLEEALPKGFLERIKDRGMVLDKFAPQPRILAHPSTGGFISHCGWNSAMESIQFGVPIIAMPIHNDQPINAKLMVELGVAVEIRRDDDGKIHREEIAETLKRVVTGETGEELRRKVRELSEKLKSIRDEEMNQVAEEMIQLCRNSNKSK

SEQ ID NO: 243 - protein, 442 aa, Artificial Sequence
  engineered beta-1,2-glycosyltransferase encoded in plasmid pA29937
MATNLRVLMFPWLAYGHISPFLNLAKQLANRGFLIYLCSTRINLESIKHKIPEKYADSIHLVELQLPELPELPPHYHTTNGLPPHLNPTLHKALKMSKPNFSNILQNHKPDLLIYDVLQPWAEEVANEQNIPAAKLLTSPAAVFSFFFHFRKNPGVEFPFPTIHLPEHEKVKIREILAKEPEEGGRLNECNKQIMLMCTSREIEAKYIDYCSELCNWKVVPVGPLFQDLITNDDDDKELIKWLDKKDENSVVFVSFGSEYFLSKEDMEEMAHALELSNVNFIWVARFPKGEERNLEEALPKGFLERIKDRGMVLDKFAPQPRILAHPSTGGFISHCGWNSAMESIQFGVPIIAMPIHNDQPINAKLMVELGVAVEIRRDDDGKIHREEIAETLKKVVTGETGEELRRKVRELSEKLKSIRDEEMNQVAEELIQLCRNSNKSK

SEQ ID NO: 244 - protein, 442 aa, Artificial Sequence
  engineered beta-1,2-glycosyltransferase encoded in plasmid pA29938
MATNLRVLMFPWLAYGHISPFLNIAKQLADRGFLIYLCSTRINLESIKKKIPEKYADSIHLIELQLPELPELPPHYHTTNGLPPHLNPTLHKALKMAKPNFSRILQNLKPDLLIYDVLQPWAEEVANEQNIPAGKLLTSSAAVFSYFFHFRKNPGVEFPFPAIYLPEVEKVKIREILAKEPEEGGRLRECNKQMILMCTSREIEAKYIDYCSELCNWKVVPVGPLFQDLITNDNDDRELIKWLGKKDENSVVFVSFGSEYFLSKEDMEEIAFALELSNVNFIWVARFPKGEEINLEDALPKGFLERIGERGRVLDKFAPQPRILAHPSTGGFISHCGWNSAMESLQFGVPIIAMPIHNDQPINAKLMVELGVAVEIVRDDDGKIHREEIAETLKKVVTGETGEILRKKVREMSKNLKSIRDEEMDEVAEELIQLCRNSNKSK

SEQ ID NO: 245 - protein, 442 aa, Artificial Sequence
  engineered beta-1,2-glycosyltransferase encoded in plasmid pA29939
MATNLRVLMFPWLAYGHISPFLNIAKQLADRGFLIYLCSTRINLESIKKKIPEKYADSIHLIELQLPELPELPPHYHTTNGLPPHLNPTLHKALKMAKPNFSRILQNLKPDLLIYDVLQPWAEEVANEQNIPAGKLLTSCAAVFSYFFHFRKNPGVEFPFPAIYLPEVEKVKIREILAKEPEEGGRLREGNKQMMLMCTSRTIEAKYIDYCTELCNWKVVPVGPPFQDLITNDNDNRELIKWLGTKDENSVVFVSFGSEYFLSKEDMEEVAFALELSNVNFIWVARFPKGEERNLEDALPKGFLERIGERGRVLDKFAPQPRILAHPSTGGFISHCGWNSAMESIQFGVPIIAMPIHNDQPINAKLMVELGVAVEIVRDDDGKIHREEIAETLKSVVTGETGEILRAKVREMSKNLKSIRDEEMDEVAEELIQLCRNSNKSK

SEQ ID NO: 246 - protein, 442 aa, Artificial Sequence
  engineered beta-1,2-glycosyltransferase encoded in plasmid pA29941
MATNLRVLMFPWLAYGHISPFLNIAKQLADRGFHIYLCSTRINLESIRKKIPEKYADSIHLIELQLPELPELPPHYHTTNGLPPHLNPTLHKALKMAKPNFSNILQNLKPDLLIYDVLQPWAEEVANEQNIPAGKLLTSSAAVFSYFFHFRKNPGVEFPFPAIYLPEVERVKIREELAKDPEEEGRLRECNKHMILMCTSREIEAKYIDYCSELCNWKVVPVGPLFQDLITNDNDDRELIKWLGKKDENSVVFVSFGSEYFLSKEDFEEIAHALELSNVNFIWVARFPKGEKINLEEALPKGFLERVKDRGRVLEKFAPQPRILAHPSTGGFISHCGWNSAMESLQFGVPIIAMPIHNDQPINAKLMVELGVAVEIRRDDDGKIHREEIAEALKKVVTGETGEELRRKVREMSKNLKNNGDEEMDEVAEELIQLCRNSNKSK

SEQ ID NO: 247 - protein, 442 aa, Artificial Sequence
  engineered beta-1,2-glycosyltransferase encoded in plasmid pA29942
MATNLRVLMFPWLAYGHISPFLNIAKQLADRGFLIYLCSTRINLNSIKKKIPEKYAESIHLIELHLPELPELPPHYHTTNGLPPHLNPTLHKALKMSKPNFSRILKNLKPDLLIYDVLQPWAEEVANEHNIPAAKLLTSCAAVFAYFFHFRKKPGVEFPFPNIYLPEIEKRKIREILAKHPEEKGRWREGNCHMMLMCTSREIEAKYIDYCSELCNWKVVPVGPPVQDPITNDADDDELIKWLDKKEENSVVFVSFGSEYFLSKEDMEEVAHALELSNVNFIWVARFPKGEKTNLEDALPKGFLERIKDRGIVLEKFAPQPRILAHPSTGGFISHCGWNSAMESLKFGVPIIAMPIHNDQPINAKLMVELGVAVEIRRDDDGKIHREEIAETLKSVVTGETGEELRRKVREISKNLCSDRDEEMDQVAEELIQLCRNSNKSK

SEQ ID NO: 248 - protein, 442 aa, Artificial Sequence
  engineered beta-1,2-glycosyltransferase encoded in plasmid pA29943
MATNLRVLMFPWLAYGHISPFLNIAKQLADRGFLIYLCSTRINLESIKKKIPEKYADSIHLIELQLPELPELPPHYHTTNGLPPHLNPTLHKALKMSKPNFSRILQNLKPDLLIYDVLQPWAEEVANEHNIPAAKLLTSCAAVFSYFFHFRKNPGVEFPFPKIYLPEIEKVKIREILAKEPEEKGRWDEGNKQMMLMCTSREIEAKYIDYCSELCNWKVVPVGPPFQDSITNDADDDELIKWLDKKDENSVVFVSFGSEYFLSKEDMEEVAFALELSNVNFIWVARFPKGEETNLEDALPKGFLERIGERGRVLDKFAPQPRILAHPSTGGFISHCGWNSAMESLYFGVPIIAMPIHNDQPINAKLMVELGVAVEIRRDDDGKIHREEIAETLKSVVTGETGEILRKKVREISKNLCSDRDEEMDQVAEELIQLCRNSNKSK

SEQ ID NO: 249 - protein, 442 aa, Artificial Sequence
  engineered beta-1,2-glycosyltransferase encoded in plasmid pA29944
MATNLRVLMFPWLAYGHISPFLNIAKQLADRGFLIYLCSTRINLESIKKKIPEKYADSIHLIELQLPELPELPPHYHTTNGLPPHLNPTLHKALKMSKPNFSRILQNLKPDLLIYDVLQPWAEEVANEQNIPAAKLLTSCAAVFSYFFHFRKNPGVEFPFPAIYLPEIEKVKIREILAKEPEEKGRLDEGNKQMMLMCTSREIEAKYIDYCTELCNWKVVPVGPPFQDSITNDADNDELIKWLDTKDENSVVFVSFGSEYFLSKEDMEEVAFALELSNVNFIWVARFPKGEETNLEDALPKGFLERIGERGRVLDKFAPQPRILAHPSTGGFISHCGWNSAMESLYFGVPIIAMPIHNDQPINAKLMVELGVAVEIVRDDDGKIHREEIAETLKSVVTGETGEILRAKVREISKNLKSDRDEEMDQVAEELIQLCRNSNKSK

SEQ ID NO: 250 - protein, 442 aa, Artificial Sequence
  engineered beta-1,2-glycosyltransferase encoded in plasmid pA29945
MATNLRVLMFPWLAYGHISPFLNIAKQLADRGFLIYLCSTRINLESIKKKIPEKYADSIHLIELQLPELPELPPHYHTTNGLPPHLNPTLHKALKMSKPNFSRILQNLKPDLLIYDVLQPWAEEVANEQNIPAGKLLTSCAAVFSYFFHFRKNPGVEFPFPAIYLPEVEKVKIREILAKEPEEGGRLDEGNKQMMLMCTSRTIEAKYIDYCTELCNWKVVPVGPPFQDSITNDADNDELIDWLDTKHENSVVFVSFGSEYFLSKEDMEEVAFALELSNVNFIWVARFPKGEERNLEDALPKGFLERIGERGRVLDKFAPQPRILNHPSTGGFISHCGWNSAMESLYFGVPIIAMPIHNDQPINAKLMVELGVAVEIVRDDDGKIHREEIAETLKSVVTGETGEILRAKVREISKNLKSDRDEEMDAVAEELIQLCRNSNKSK

SEQ ID NO: 251 - protein, 442 aa, Artificial Sequence
  engineered beta-1,2-glycosyltransferase encoded in plasmid pA29946
MATNLRVLMFPWLAYGHISPFLNIAKRLADRGFLIYLCSTRINLESIIKKIPEKYADSIHLIELQLPELPELPPHYHTTNGLPPHLNPTLHKALKMSKPNFSRILQNLKPDLLIYDVLQPWAEEVANEQNIPAGKLLTSCAAVFSYFFSFRFNPGVEFPFPAIHLREVEKVKIREALAKEPEEGGRLDECNKQMMLMCTSREIEAKYIDYCTELCNRKVVPVGPPFQDLITNDDDDHELIKWLGTKEENSVVFVSFGSEYFLSKEDMEEVAFALELSNVNFIWVARFSKGEERNLEDALPKGFLERIGERGMVLDKFAPQPRILAHPSTGGFISHCGWNSAMESIQFGVPIIAMPIHNDQPINAKLMVELGVAVEIVRDDDGKIHREEIAETLKSVVTGETGEILRRKVREISKNLKSIRDEEMDAVIEELIQLCRNSNKSK

SEQ ID NO: 252 - protein, 442 aa, Artificial Sequence
  engineered beta-1,2-glycosyltransferase encoded in plasmid pA29947
MATNLRVLMFPWLAYGHISPFLNIAKRLADRGFLIYLCSTHINLESIIKKLPEKYANSIHLIELQLPELPELPPHYHTTNGLPPHLNPTLHKALDMSKPNFSNILQNLKPDLLIYDVLQPWAEEVASEQNIPAGKLLTSGAAVFSYFFSFLFNPGVEFPFPAIYLREMEKVKIREALAKEPEETGRLLECNCHMMLMCTSREIEAKYIDYCSELCNRKVVPVGPPFQDLITNDNDWHELIKWLGKKDENSVVFVSFGSEYFLSKEDMEEVAHALELSNVNFIWVARFSKGEERNLEEALPKGFLERIKDRGMVLEKFAPQPRILAHPSTGGFISHCGWNSAMESLQFGVPIIAMPIHNDQPINAKLMVELGVAVEIRRDDNGKIHREEIARTLKKVVTGETGEELRRKVREISEKLKSIRDEEMDQVIEELIQLCRNSNKSK

SEQ ID NO: 253 - protein, 442 aa, Artificial Sequence
  engineered beta-1,2-glycosyltransferase encoded in plasmid pA29948
MATNLRVLMFPWLAYGHISPFLNIAKRLADRGFLIYLCSTRINLESIIKKIPEKYATSIHLIELQLPELPELPPHYHTTNGLPPHLNPTLHKALDMSKPNFSRILQNLKPDLLIYDVLQPWAEEVANEQNIPAGKLLTSSAAVFSYFFSFLFNPGVEFPFPAIHLREIEKVKIREALAKEPEETGRLDECNKHMMLMCTSREIEAKYIDYCSELCNRKVVPVGPPFQDLITNDDDDHELIKWLGKKDENSVVFVSFGSEYFLSKEDMEEVAHALELSNVNFIWVARFSKGEERNLEDALPKGFLERIGERGMVLDKFAPQPRILAHPSTGGFISHCGWNSAMESIQFGVPIIAMPIHNDQPINAKLMVELGVAVEIRRDDDGKIHREEIAETLKKVVTGETGERLRRKVREISKNLKSIRDEEMDKVIEELIQLCRNSNKSK

SEQ ID NO: 254 - protein, 442 aa, Artificial Sequence
  engineered beta-1,2-glycosyltransferase encoded in plasmid pA29949
MATNLRVLMFPWLAYGHISPFLNIAKRLADRGFLIYLCSTRINLESIIKKIPEKYADSIHLIELQLPELPELPPHYHTTNGLPPHLNPTLHKALKMSKPNFSRILQNLKPDLLIYDVLQPWAEEVANEQNIPAGKLLTSCAAVFSYFFSFRFNPGVEFPFPAIHLREVEKVKIREILAKEPEEGGRLDECNKQMMLMCTSREIEAKYIDYCTELCNRKVVPVGPPFQDLITNDNDNKELIKWLGTKHENSVVFVSFGSEYFLSKEDMEEVAFALELSNVNFIWVARFHKGEERNLEDALPKGFLERIGERGRVLDKFAPQPRILNHPSTGGFISHCGWNSAMESIQFGVPIIAMPIHNDQPINAKLMVELGVAVEIVRDDDGKIHREEIAETLKSVVTGETGEILRAKVREISKNLKSIRDEEMDAVAEELIQLCRNSNKSK

SEQ ID NO: 255 - protein, 442 aa, Artificial Sequence
  engineered beta-1,2-glycosyltransferase encoded in plasmid pA29950
MATNLRVLMFPWLAYGHISPFLNLAKQLADRGFLIYLCSTRINLESIIKKIPEKYARSIHLIELQLPELPKLPPHYHTTNGLPPHLNPTLHKALDMSKPNFSNILQNLKPDLLIYDVLQPWAEEVANEQNIPAAKLLTSSAAVFSYFFSFINNPGVEFPFPAIHLPDYEKVKIREILANNPEEGGRLAECNKQMMLMCTSREIEAKYIDYCSELCNWKVVPVGPPFQDLPTNDDDWLELIKWLDKKEENSVVFVSFGSEYFLSKEDMEEMAHALELSNVNFIWVARFPKGEERNIEDALPKGFLERIKDRGRVLEKFAPQPRILAHPSTGGFISHCGWNSAMESIQFGVPIIAMPIHNDQPINAKLMVELGVAVEIRRDDDGKIHREEIAEVLKKVVTGETGEELRKKVREMSKNLKDIRDEEMDEAAEEIIQLCRNSNKSK

SEQ ID NO: 256 - protein, 442 aa, Artificial Sequence
  engineered beta-1,2-glycosyltransferase encoded in plasmid pA29951
MATNLRVLMFPWLAYGHISPFLNLAKQLADRGFLIYLCSTRINLESIIKKIPEKYARSIHLIELQLPELPKLPPHYHTTNGLPPHLNPTLHKALKMSKPNFSRILQNLKPDLLIYDVLQPWAEEVANEQNIPAGKLLTSCAAVFSYFFSFRKNPGVEFPFPAIHLPEYEKVKIREILAKEPEEGGRLDECNKQMMLMCTSRTIEAKYIDYCTELCNWKVVPVGPPFQDLITNDADNKELIDWLNTKHENSVVFVSFGSEYFLSKEDMEEVAFALELSNVNFIWVARFPKGEERNIEDALPKGFLERIGERGRVLDKFAPQPRILNHPSTGGFISHCGWNSAMESIQFGVPIIAMPIHNDQPINAKLMVELGVAVEIVRDDDGKIHREEIAETLKSVVTGETGEILRAKVREMSKNLKSIRDEEMDAAAEELIQLCRNSNKSK

SEQ ID NO: 257 - protein, 442 aa, Artificial Sequence
  engineered beta-1,2-glycosyltransferase encoded in plasmid pA29952
MATNLRVLMFPWLAYGHISPFLNLAKQLADRGFLIYLCSTRINLESIIKKIPEKYARSIHLIELQLPELPKLPPHYHTTNGLPPHLNPTLHKALDMSKPNFSNILQNLKPDLLIYDVLQPWAEKVANEQNIPAAKLLTSSAAVFSYFFSFINNPGVEFPFPAIHLPDYEKVKIREILANNPEEVGRLAECNKQMMLMCTSREIEAKYIDYCSELCNWKVVPVGPPFQDLPTNDDDWLELIKWLDKKEENSVVFVSFGSEYFLSKEDMEEMAHALELSNVNFIWVARFPKGEERNIEDALPKGFLERIKDRGRVLEKFAPQPRILAHPSTGGFISHCGWNSAMESIQFGVPIIAMPIHNDQPINAKLMVELGVAVEIRRDDDGKIHREEIAEVLKKVVTGETGEELRKKVREMSKNLKDIRDEEMDNAAEEIIQLCRNSNKSK

SEQ ID NO: 258 - protein, 442 aa, Artificial Sequence
  engineered beta-1,2-glycosyltransferase encoded in plasmid pA29953
MATNLRVLMFPWLAYGHISPFLNLAKQLADRGFLIYLCSTRINLESIIKKIPEKYARSIHLIELQLPELPKLPPHYHTTNGLPPHLNPTLHKALDMSKPNFSRILQNLKPDLLIYDVLQPWAEEVANEQNIPAAKLLTSCAAVFSYFFSFIKNPGVEFPFPAIHLPEYEKVKIREILAKEPEEDGRLDECNKQMMLMCTSRTIEAKYIDYCTELCNWKVVPVGPPFQDLITNDEDNKELIDWLNTKEENSVVFVSFGSEYFLSKEDMEEVAFALELSNVNFIWVARFPKGEERNIEDALPKGFLERIGERGRVLEKFAPQPRILAHPSTGGFISHCGWNSAMESIQFGVPIIAMPIHNDQPINAKLMVELGVAVEIVRDDDGKIHREEIAETLKSVVTGETGEILRAKVREMSKNLKSIRDEEMDAAAEELIQLCRNSNKSK

SEQ ID NO: 259 - protein, 442 aa, Artificial Sequence
  engineered beta-1,2-glycosyltransferase encoded in plasmid pA29954
MATNLRVLMFPWLAYGHISPFLNLAKQLADRGFLIYLCSTRINLESIIKKIPEKYARSIHLIELQLPELPKLPPHYHTTNGLPPHLNPTLHKALDMSKPNFSRILQNLKPDLLIYDVLQPWAEQVANEQNIPAAKLLTSCAAVFSYFFSFIKNPGVEFPFPAIHLPEYEKVKIREILAKEPEEDGRLDECNKQMMLMCTSRTIEAKYIDYCTELCNWKVVPVGPPFQDLITNDDDNKELIDWLNTKEENSVVFVSFGSEYFLSKEDMEEVAFALELSNVNFIWVARFPKGEERNIEDALPKGFLERIGERGRVLEKFAPQPRILAHPSTGGFISHCGWNSAMESIQFGVPIIAMPIHNDQPINAKLMVELGVAVEIVRDDDGKIHREEIAETLKSVVTGETGEILRAKVREMSKNLKSIRDEEMDAAAEELIQLCRNSNKSK

SEQ ID NO: 260 - protein, 442 aa, Artificial Sequence
  engineered beta-1,2-glycosyltransferase encoded in plasmid pA29955
MATNLRVLMFPWLAYGHISPFLNLAKQLADRGFLIYLCSTRINLESIIKKIPEKYARSIHLIELQLPELPKLPPHYHTTNGLPPHLNPTLHKALDMSKPNFSRILQNLKPDLLIYDVLQPWAEKVANEQNIPAAKLLTSSAAVFSYFFSFIKNPGVEFPFPAIHLPDYEKVKIREILAKEPEEVGRLDECNKQMMLMCTSREIEAKYIDYCSELCNWKVVPVGPPFQDLITNDEDDKELIKWLNKKDENSVVFVSFGSEYFLSKEDMEEVAHALELSNVNFIWVARFPKGEERNIEDALPKGFLERIGERGRVLEKFAPQPRILAHPSTGGFISHCGWNSAMESIQFGVPIIAMPIHNDQPINAKLMVELGVAVEIVRDDDGKIHREEIAETLKKVVTGETGEILRKKVREMSKNLKSIRDEEMDQAAEELIQLCRNSNKSK

SEQ ID NO: 261 - protein, 442 aa, Artificial Sequence
  engineered beta-1,2-glycosyltransferase encoded in plasmid pA29956
MATNLRVLMFPWLAYGHISPFLNLAKQLADRGFQIYLCSTRINLESIKKKIPEKYADSIHLIELQLPELPKLPPHYHTTNGLPPHLNPTLHKALKMSKPNFCRILQNLKPDLLIYDVLQPWAEEVANELNIPAAKLLTSNAAVFSYFYHFLKNPGVEFPFPAIYLPEHEKVKIREDLAKLPEEKGRLDECNYQMMLMCTCREIEAKYIDYCSELCNWKVVPVGPPIQDPITNDDDDKELMKWLDKKDENSTVFVSFGSEYFLSKEDMEEVAKALELSNVNFIWVARFPKGEKRNLEDALPKGFLERIGERGIVLDKFAPQPRILAHPSTGGFISHCGWNSAMESLHFGVPIIAMPIHNDQPINAKLMVELGVAVEIVRDDDGKIHRGEIAETIKKVVTGETGEILRKKVREISKKLKKQRDEEMDAYVEELIQLCRNSNKSK

SEQ ID NO: 262 - protein, 442 aa, Artificial Sequence
  engineered beta-1,2-glycosyltransferase encoded in plasmid pA29957
MATNLRVLMFPWLAYGHISPFLNLAKQLADRGFQIYLCSTRINLESIKKKIPEKYADSIHLIELQLPELPKLPPHYHTTNGLPPHLNPTLHKALKMSKPNFSRILQNLKPDLLIYDVLQPWAEEVANEQNIPAAKLLTSCAAVFSYFFHFRKNPGVEFPFPAIHLPEHEKVKIREILAKEPEEGGRLDECNKQMMLMCTCREIEAKYIDYCTELCNWKVVPVGPPIQDPITNDDDNKELIDWLDTKEENSTVFVSFGSEYFLSKEDMEEVAKALELSNVNFIWVARFPKGEERNLEDALPKGFLERIGERGIVLDKFAPQPRILAHPSTGGFISHCGWNSAMESIHFGVPIIAMPIHNDQPINAKLMVELGVAVEIVRDDDGKIHRGEIAETIKSVVTGETGEILRKKVREISKNLKSQRDEEMDAVAEELIQLCRNSNKSK

SEQ ID NO: 263 - protein, 442 aa, Artificial Sequence
  engineered beta-1,2-glycosyltransferase encoded in plasmid pA29958
MATNLRVLMFPWLAYGHISPFLNLAKQLADRGFKIYLCSTRINLESIKKKIPEKYADSIHLIELHLPELPQLPPHYHTTNGLPPHLNPTLHKALKMSKPNFSKILQNLKPDLLIYDVLQPWAEEVANELNIPAAKLLTSSAAVFSYFFHFLKNPGVEFPFPSIHLPEHEKQKIREELAKYPEEKGRLRECNCQMMLMCTCREIEAKYIDYCSELCNWKVVPVGPPFQDPITNDDDDKELMKWLDKKDEHSTVFVSFGSEYFLSKEDMEELAHALELSNVNFIWVLRFPKGEKRNLEDALPKGFLERIKDRGIVLDKFAPQPRILAHPSTGGFISHCGWNSAMESLYFGVPIIAMPIHNDQPINAKLMVELGVAVEIRRDDDGKFHREEIAETIKKVVTGETGEELRRKVREISKKLKKKRDEEMDAYAEELIQLCRNSNKSK

SEQ ID NO: 264 - protein, 442 aa, Artificial Sequence
  engineered beta-1,2-glycosyltransferase encoded in plasmid pA29959
MATNLRVLMFPWLAYGHISPFLNLAKQLADRGFQIYLCSTRINLESIKKKIPEKYADSIHLIELQLPELPKLPPHYHTTNGLPPHLNPTLHKALKMSKPNFCRILQNLKPDLLIYDVLQPWAEEVANELNIPAAKLLTSNAAVFSYFYHFLKNPGVEFPFPAIHLPEHEKVKIREDLAKLPEEKGRLDECNYQMMLMCTCREIEAKYIDYCSELCNWKVVPVGPPIQDPITNDDDDKELMKWLDKKDENSTVFVSFGSEYFLSKEDMEEVAKALELSNVNFIWVARFPKGEKRNLEDALPKGFLERIGERGIVLDKFAPQPRILAHPSTGGFISHCGWNSAMESLHFGVPIIAMPIHNDQPINAKLMVELGVAVEIVRDDDGKIHRGEIAETIKKVVTGETGEILRKKVREISKKLKKQRDEEMDAYAEELIQLCRNSNKSK

SEQ ID NO: 265 - protein, 442 aa, Artificial Sequence
  engineered beta-1,2-glycosyltransferase encoded in plasmid pA29960
MATNLRVLMFPWLAYGHISPFLNLAKQLADRGFKIYLCSTRINLESIKKKIPEKYADSIHLIELHLPELPQLPPHYHTTNGLPPHLNPTLHKALKMSKPNFCKILQNLKPDLLIYDVLQPWAEEVANELNIPAAKLLTSSAAVFSYFYHFLKNPGVEFPFPSIYLPEHEKQKIREELAKYPEEDGRLRECNCQMMLMCTCREIEAKYIDYCSELCNWKVVPVGPPIQDPITNDDDDKELMKWLDKKDEHSTVFVSFGSEYFLSKEDMEELAHALELSNVNFIWVARFPKGEKRNLEDALPKGFLERIKDRGIVLDKFAPQPRILAHPSTGGFISHCGWNSAMESLYFGVPIIAMPIHNDQPINAKLMVELGVAVEIRRDDDGKFHREEIAETIKKVVTGETGEELRRKVREISKKLKKQRDEEMDAYAEEVIQLCRNSNKSK

SEQ ID NO: 266 - protein, 442 aa, Artificial Sequence
  engineered beta-1,2-glycosyltransferase encoded in plasmid pA29961
MATNLRVLMFPWLAYGHISPFLNLAKQLADRGFQIYLCSTRINLESIKKKIPEKYADSIHLIELQLPELPKLPPHYHTTNGLPPHLNPTLHKALKMSKPNFSRILQNLKPDLLIYDVLQPWAERVANEQNIPAAKLLTSCAAVFSYFFHFRKNPGVEFPFPAIHLPEHEKVKIREILAKEPEEGGRLDECNKQMMLMCTSREIEAKYIDYCTELCNWKVVPVGPPFQDPITNDDDNKELIDWLDTKHENSTVFVSFGSEYFLSKEDMEEVAKALELSNVNFIWVARFPKGEERNLEDALPKGFLERIGERGIVLDKFAPQPRILNHPSTGGFISHCGWNSAMESIWFGVPIIAMPIHNDQPINAKLMVELGVAVEIVRDDDGKIHRGEIAETIKSVVTGETGEILRAKVREISKNLKSQRDEEMDAVVEELIQLCRNSNKSK

SEQ ID NO: 267 - protein, 442 aa, Artificial Sequence
  engineered beta-1,2-glycosyltransferase encoded in plasmid pA29962
MATNLRVLMFPWLAYGHISPFLNLAKQLADRGFKIYLCSTRINLESIKKKIPEKYADSIHLIELHLPELPQLPPHYHTTNGLPPHLNPTLHKALKMSKPNFSKILQNLKPDLLIYDVLQPWAEEVANELNIPAAKLLTSSAAVFSYFYHFLKNPGVEFPFPSIYLPEHEKQKIREELAKYPEEKGRLRECNCQMMLMCTCREIEAKYIDYCSELCNWKVVPVGPPIQDPITNDDDDKELMKWLDKKDEHSTVFVSFGSEYFLSKEDMEELAHALELSNVNFIWVARFPKGEKRNLEDALPKGFLERIKDRGIVLDKFAPQPRILAHPSTGGFISHCGWNSAMESLYFGVPIIAMPIHNDQPINAKLMVELGVAVEIRRDDDGKFHREEIAETIKKVVTGETGEELRRKVREISKKLKKKRDEEMDAYAEEVIQLCRNSNKSK

SEQ ID NO: 268 - protein, 442 aa, Artificial Sequence
  engineered beta-1,2-glycosyltransferase encoded in plasmid pA29963
MATNLRVLMFPWLAYGHISPFLNLAKQLADRGFQIYLCSTRINLESIKKKIPEKYADSIHLIELQLPELPKLPPHYHTTNGLPPHLNPTLHKALKMSKPNFSRILQNLKPDLLIYDVLQPWAEEVANEQNIPAAKLLTSCAAVFSYFFHFRKNPGVEFPFPAIHLPEHEKVKIREILAKEPEEGGRLDECNYQMMLMMTSREIEAKYIDYCTELCNWKVVPVGPPIQDPITNDDDNKELIDWLDTKEENSTVFVSFGSEYFLSKEDMEEVAKALELSNVNFIWVARFPKGEERNLEDALPKGFLERIGERGIVLDKFAPQPRILAHPSTGGFISHCGWNSAMESIHFGVPIIAMPIHNDQPINAKLMVELGVAVEIVRDDDGKIHRGEIAETIKSVVTGETGEILRKKVREISKNLKSQRDEEMDAVVEELIQLCRNSNKSK

SEQ ID NO: 269 - protein, 442 aa, Artificial Sequence
  engineered beta-1,2-glycosyltransferase encoded in plasmid pA29964
MATNLRVLMFPWLAYGHISPFLNLAKQLADRGFKIYLCSTRINLESIKKKIPEKYADSIHLIELHLPELPQLPPHYHTTNGLPPHLNPTLHKALKMSKPNFSKILQNLKPDLLIYDVLQPWAEEVANELNIPAAKLLTSSAAVFSYFFHFLKNPGVEFPFPSIHLPEHEKQKIREDLAKYPEEDGRLRECNCQMMLMCTCREIEAKYIDYCSELCNWKVVPVGPPIQDPITNDDDDKELMKWLDKKDEHSTVFVSFGSEYFLSKEDMEELAHALELSNVNFIWVARFPKGEKRNLEDALPKGFLERIKDRGIVLDKFAPQPRILAHPSTGGFISHCGWNSAMESLYFGVPIIAMPIHNDQPINAKLMVELGVAVEIRRDDDGKFHREEIAETIKKVVTGETGEELRRKVREISKKLKKKRDEEMDAYAEEVIQLCRNSNKSK

SEQ ID NO: 270 - protein, 442 aa, Artificial Sequence
  engineered beta-1,2-glycosyltransferase encoded in plasmid pA29965
MATNLRVLMFPWLAYGHISPFLNLAKQLADRGFQIYLCSTRINLESIKKKIPEKYADSIHLIELQLPELPKLPPHYHTTNGLPPHLNPTLHKALKMSKPNFCRILQNLKPDLLIYDVLQPWAEEVANELNIPAAKLLTSNAAVFSYFFHFLKNPGVEFPFPAIHLPEHEKVKIREDLAKLPEEKGRLDECNYQMMLMMTCREIEAKYIDYCSELCNWKVVPVGPPFQDPITNDDDDKELMKWLDKKDENSTVFVSFGSEYFLSKEDMEEVAKALELSNVNFIWVARFPKGEKRNLEDALPKGFLERIGERGIVLDKFAPQPRILAHPSTGGFISHCGWNSAMESLWFGVPIIAMPIHNDQPINAKLMVELGVAVEIVRDDDGKIHRGEIAETIKKVVTGETGEILRKKVREISKKLKKQRDEEMDAYAEELIQLCRNSNKSK

SEQ ID NO: 271 - protein, 442 aa, Artificial Sequence
  engineered beta-1,2-glycosyltransferase encoded in plasmid pA29966
MATNLRVLMFPWLAYGHISPFLNLAKQLADRGFQIYLCSTRINLESIKKKIPEKYADSIHLIELQLPELPKLPPHYHTTNGLPPHLNPTLHKALKMSKPNFSRILQNLKPDLLIYDVLQPWAEEVANEQNIPAAKLLTSCAAVFSYFYHFRKNPGVEFPFPAIHLPEHEKVKIREILAKEPEEGGRLDECNKQMMLMCTCREIEAKYIDYCTELCNWKVVPVGPPIQDPITNDDDNKELIDWLDTKEENSTVFVSFGSEYFLSKEDMEEVAKALELSNVNFIWVARFPKGEERNLEDALPKGFLERIGERGIVLDKFAPQPRILAHPSTGGFISHCGWNSAMESIHFGVPIIAMPIHNDQPINAKLMVELGVAVEIVRDDDGKIHRGEIAETIKSVVTGETGEILRKKVREISKNLKSQRDEEMDAVVEELIQLCRNSNKSK

SEQ ID NO: 272 - protein, 442 aa, Artificial Sequence
  engineered beta-1,2-glycosyltransferase encoded in plasmid pA29967
MATNLRVLMFPWLAYGHISPFLNLAKQLADRGFQIYLCSTRINLESIKKKIPEKYADSIHLIELQLPELPKLPPHYHTTNGLPPHLNPTLHKALKMSKPNFSRILQNLKPDLLIYDVLQPWAEEVANEQNIPAAKLLTSCAAVFSYFFHFRKNPGVEFPFPAIHLPEHEKVKIREILAKEPEEGGRLDECNYQMMLMCTSREIEAKYIDYCTELCNWKVVPVGPPFQDPITNDDDNKELIDWLDTKHENSTVFVSFGSEYFLSKEDMEEVAKALELSNVNFIWVARFPKGEERNLEDALPKGFLERIGERGIVLDKFAPQPRILNHPSTGGFISHCGWNSAMESIWFGVPIIAMPIHNDQPINAKLMVELGVAVEIVRDDDGKIHRGEIAETIKSVVTGETGEILRAKVREISKNLKSQRDEEMDAVVEELIQLCRNSNKSK

SEQ ID NO: 273 - protein, 442 aa, Artificial Sequence
  engineered beta-1,2-glycosyltransferase encoded in plasmid pA29968
MATNLRVLMFPWLAYGHISPFLNLAKKLADRGFLIYLCSTRINLESIKKKIPEKYADSIHLIEIQLPELPELPPHYHTTNGLPPHLNPTLHKALDMAKPNFSRILKNLKPDLLIYDVLQPWAEHVANEQNIPAAMLLTSSAAVFSYFFHFRKNPGVEFPFPAIYLPEYEKQKIREVLANEPEEKGRLNECNKQIMLMCTSREIEAKYIDYCSELCNKKVIPVGPLVQDSITNDEDDKELIDWLDKKDENSVVFVSFGSEYFLSKEDMEELAHALELSNVNFIWVARFPKGEEMNLEDALPKGFLERIKDRGRVLEKFAPQPRILAHPSTGGFISHCGWNSAMESLYFGVPIIAMPIHNDQPINAKLMVELGVAVEIVRDDDGKIHREEIAKTLKKVVTGETGEELRRKVREISEKLKSRRDEEWDQTVEELIQLCRNSNKSK

SEQ ID NO: 274 - protein, 442 aa, Artificial Sequence
  engineered beta-1,2-glycosyltransferase encoded in plasmid pA29969
MATNLRVLMFPWLAYGHISPFLNLAKKLADRGFLIYLCSTRINLESIKKKIPEKYADSIHLIEIQLPELPELPPHYHTTNGLPPHLNPTLHKALDMAKPNFSRILKNLKPDLLIYDVLQPWAEHVANEQNIPAAMLLTSSAAVFSYFFHFRKNPGVEFPFPAIYLPEYEKKKIREVLANEPEEEGRLNECNKQIMLMCTSREIEAKYIDYCSELCNKKVIPVGPLVQDTITNDEDDKELIDWLDKKDENSVVFVSFGSEYFLSKEDMEELAHALELSNVNFIWVARFPKGEELNLEDALPKGFLERIKDRGRVLEKFAPQPRILAHPSTGGFISHCGWNSAMESLYFGVPIIAMPIHNDQPINAKLMIELGVAVEIVRDDDGKIHREEIAKTLKKVVTGETGEELRRKVREISEKLKSHRDEEWDQTVEELIQLCRNSNKSK

SEQ ID NO: 275 - protein, 442 aa, Artificial Sequence
  engineered beta-1,2-glycosyltransferase encoded in plasmid pA29970
MATNLRVLMFPWLAYGHISPFLNIAKQLADRGFHIYLCSTRINLESIRKKIPEKYADSIHLIELHLPEHPELPPHYHTTNGLPPHLNPTLHKALDMAHPNFSNILQNHKPDLLIYDVLQPWAEEVANEQNIPAGKFLTSCAAVFSFFFHFRKNPGVEFPFPTIHLPEYEKVKMREILAKEPEEGGRLRECNHQFMLMCTSREIEAKYIDYCSELCNWKVVPVGPLFQDLITNDDDDKELIKWLDKKDENSVVFVSFGSEYFLSKEDMEEMAHALELSNVNFIWVARFPKGEERNLEEALPKGFLERIKDRGLVLDKFAPQPRILAHPSTGGFISHCGWNSAMESLWFGVPIIAMPIHNDQPINAKLMVELGVAVEIRRDDDGKFHREEIAEVLKRVVTGEEGEELRRKAREMSEKLKSIRDEEMNEVAEELIQLCRNSNKSK

SEQ ID NO: 276 - protein, 442 aa, Artificial Sequence
  engineered beta-1,2-glycosyltransferase encoded in plasmid pA29971
MATNLRVLMFPWLAYGHISPFLNIAKQLADRGFHIYLCSTRINLESIRKKIPEKYADSIHLIELHLPEHPELPPHYHTTNGLPPHLNPTLHKALDMAHPNFSNILQNHKPDLLIYDVLQPWAEEVANEQNIPAAKFLTSCAAVFSFFFHFRKNPGVEFPFPTIHLPEYEKVKMREILAKEPEEGGRLRECNHQFMLMCTSREIEAKYIDYCSELCNWKVVPVGPPFQDIITNDDDWKELIKWLDKKDENSVVFVSFGSEYFLSKEDMEEMAHALELSNVNFIWVARFPKGEERNLEEALPKGFLERIKDRGLVLDKFAPQPRILAHPSTGGFISHCGWNSAMESLWFGVPIIAMPIHNDQPINAKLMVELGVAVEIRRDDDGKFHREEIAEVLKRVVTGEEGEELRRKAREMSEKLKSIRDEEMNQVAEELIQLCRNSNKSK

SEQ ID NO: 277 - protein, 442 aa, Artificial Sequence
  engineered beta-1,2-glycosyltransferase encoded in plasmid pA29972
MATNLRVLMFPWLAYGHISPFLNLAKKLADRGFLIYLCSTRINLESIKKKIPEKYADSIHLIELQLPELPELPPHYHTTNGLPPHLNPTLHKALKMSKPNFSNILQNLKPDLLIYDVLQPWAEEVANEQNIPAGKLLTSSAAVFSYFFHFRKNPGVEFPFPAIYLPEVEREKIREALAKDPEEEGRLRECNKHMILMCTCREIEAKYIDYCSELCNWKVVPVGPLFQDLITNDNDDSELIKWLDKKEENSVVFVSFGSEYFLSKEDMEEIAHALELSNVNFIWVARFPKGEKINLEEALPKGFLERVKDRGRVLEKFAPQPRILAHPSTGGFISHCGWNSAMESMYFGVPIIAMPIHNDQPINAKLMVELGVAVEIRRDDDGKIHREEIAEALKKVVTGETGEELRRKVREMSKNMKNKGEEEMDEVAEELIQLCRNSNKSK

SEQ ID NO: 278 - protein, 442 aa, Artificial Sequence
  engineered beta-1,2-glycosyltransferase encoded in plasmid pA29973
MATNLRVLMFPWLAYGHISPFLNLAKKLADRGFLIYLCSTRINFESIKKKIPEKYAKSIHLIELQLPELPELPPHYHTTNGLPPHLNPTLHKALKMSKPNFSNILQNLKPDLLIYDVLQPWAEEVANEQNIPAAKMLTSSAAVFSYFFSFRKNPGVEFPFPAIYLPDYEKRKIREALAKEPEEKGRQLECNCQMMLMCTSREIEAKYIDYCSELCNWKVVPVGPPFQDPITNDDDDLELIQWLGKKDENSVVFVSFGSEYFLSKEDMEEVAHALELSNVNFIWVVRFPKGEETNLEDALPKGFLERIKERGRVLEKFAPQPRILAHPSTGGFISHCGWNSAMESIQFGVPIIAMPIHNDQPINAKLMVELGVAVEIRRDDDGKFHREEIAETIKKVVTGETGEKLRKKAREISKKLKSERDEEMDEVAEELIQLCRNSNKSK

SEQ ID NO: 279 - protein, 442 aa, Artificial Sequence
  engineered beta-1,2-glycosyltransferase encoded in plasmid pA29976
MATNLRVLMFPWLAYGHISPFLNIAKQLADRGFLIYLCSTRINLESIKKKIPEKYADSIHLIELQLPELPELPPHYHTTNGLPPHLNPTLHKALKMAKPNFSKILQNHKPDLLIYDVLQPWAEEVANEQNIPAAKFLTSCAAVFSYFFHFRKNPGVEFPFPTIHLPEYEKVKIREILAKEPEEGGRLRECNHQFMLMCTSREIEAKYIDYCSELCNWKVVPVGPLIQDIITNDDDWKELIKWLDKKDENSVVFVSFGSEYFLSKEDMEELAFALELSNVNFIWVARFPKGEERNLEDALPKGFLERIGERGLVLDKFAPQPRILAHPSTGGFISHCGWNSAMESIKFGVPIIAMPIHNDQPINAKLMVELGVAVEIRRDDDGKFHREEIAEVLKKVMTGETGEILRKKAREMSEKLKSIRDEEMDAVAEELIQLCRNSNKSK

SEQ ID NO: 280 - protein, 442 aa, Artificial Sequence
  engineered beta-1,2-glycosyltransferase encoded in plasmid pA29977
MATNLRVLMFPWLAYGHISPFLNIAKQLADRGFLIYLCSTRINLESIKKKIPEKYADSIHLIELQLPELPELPPHYHTTNGLPPHLNPTLHKALKMSKPNFSRILQNLKPDLLIYDVLQPWAEEVANEQNIPAGKLLTSSAAVFSYFFHFRKNPGVEFPFPAIHLPEVEKVKIREILAKEPEERGRLRECNKQMILMCTCREIEAKYIDYCSELCNWKVVPVGPLFQDLITNDNDDSELIKWLGKKDENSVVFVSFGSEYFLSKEDMEEIAFALELSNVNFIWVARFPKGEEINLEDALPKGFLERVGERGRVLEKFAPQPRILAHPSTGGFISHCGWNSAMESLQFGVPIIAMPIHNDQPINAKLMVELGVAVEIVRDDDGKIHREEIAETLKKVVTGETGEILRKKVREMSKNLKSIRDEEMDEVAEELIQLCRNSNKSK

SEQ ID NO: 281 - protein, 442 aa, Artificial Sequence
  engineered beta-1,2-glycosyltransferase encoded in plasmid pA29978
MATNLRVLMFPWLAYGHISPFLNIAKQLADRGFLIYLCSTRINFESIKKKIPEKYAKSIHLIELQLPELPELPPHYHTTNGLPPHLNPTLHKALKMSKPNFSRILQNLKPDLLIYDVLQPWAEEVANEQNIPAAKLLTSSAAVFSYFFSFRKNPGVEFPFPAIYLPDIEKRKIREILAKEPEEKGRKDECNKQMMLMCTSRTIEAKYIDYCSELCNWKVVPVGPPFQDPITNDDDNHELIKWLGKKDENSVVFVSFGSEYFLSKEDMEEVAFALELSNVNFIWVLRFPKGEETNLEDALPKGFLERIKERGRVLDKFAPQPRILAHPSTGGFISHCGWNSAMESIQFGVPIIAMPIHNDQPINAKLMVELGVAVEIVRDDDGKIHREEIAETLKKVVTGETGEILRAKVREISKNLKSIRDEEMDEVAEELIQLCRNSNKSK

SEQ ID NO: 282 - protein, 442 aa, Artificial Sequence
  engineered beta-1,2-glycosyltransferase encoded in plasmid pA29979
MATNLRVLMFPWLAYGHISPFLNLAKKLADRGFLIYLCSTRINLESIKKKIPEKYADSIHLIELQLPELPELPPHYHTTNGLPPHLNPTLHKALKMAKPNFSRILQNLKPDLLIYDVLQPWAEHVANEQNIPAAMLLTSSAAVFSYFFHFRKNPGVEFPFPAIYLPEYEKQKIREILAKEPEEEGRLDECNKQMMLMCTSREIEAKYIDYCTELCNKKVVPVGPLVQDLITNDADDKELIDWLGTKEENSVVFVSFGSEYFLSKEDMEEVAFALELSNVNFIWVARFPKGEERNLEDALPKGFLERIGERGRVLEKFAPQPRILAHPSTGGFISHCGWNSAMESIYFGVPIIAMPIHNDQPINAKLMVELGVAVEIVRDDDGKIHREEIAETLKRVVTGETGEILRAKVREISKNLKSRRDEEMDATVEELIQLCRNSNKSK

SEQ ID NO: 283 - protein, 442 aa, Artificial Sequence
  engineered beta-1,2-glycosyltransferase encoded in plasmid pA29980
MATNLRVLMFPWLAYGHISPFLNIAKQLADRGFLIYLCSTRINLESIKKKIPEKYADSIHLIELQLPELPELPPHYHTTNGLPPHLNPTLHKALKMAKPNFSRILQNHKPDLLIYDVLQPWAEEVANEQNIPAGKFLTSCAAVFSYFFHFRKNPGVEFPFPEIHLPEYEKVKIREILAKEPEEGGRLRECNHQFMLMCTSREIEAKYIDYCSELCNWKVVPVGPLIQDIIFNDDDWKELIDWLDTKDENSVVFVSFGSEYFLSKEDMEEIAFALELSNVNFIWVARFPKGEERNLEDALPKGFLERIGERGRVLDKFAPQPRILNHPSTGGFISHCGWNSAMESIKFGVPIIAMPIHNDQPINAKLMVELGVAVEIVRDDDGKFHREEIAEVLKKVVTGETGEILRRKAREMSKKLKSIRDEEMDAVAEELIQLCRNSNKSK

SEQ ID NO: 284 - protein, 442 aa, Artificial Sequence
  engineered beta-1,2-glycosyltransferase encoded in plasmid pA29981
MATNLRVLMFPWLAYGHISPFLNIAKQLADRGFLIYLCSTRINLESIKKKIPEKYADSIHLIELQLPELPELPPHYHTTNGLPPHLNPTLHKALKMSKPNFSRILQNLKPDLLIYDVLQPWAEEVANEQNIPAGKLLTSCAAVFSYFFHFRKNPGVEFPFPAIHLPEVEKVKIREILAKEPEEGGRLREGNKQMILMCTSRTIEAKYIDYCSELCNWKVVPVGPPFQDLITNDNDNRELIKWLGTKEENSVVFVSFGSEYFLSKEDMEEIAFALELSNVNFIWVARFPKGEERNLEDALPKGFLERIGERGRVLDKFAPQPRILAHPSTGGFISHCGWNSAMESIYFGVPIIAMPIHNDQPINAKLMVELGVAVEIVRDDDGKIHREEIAETLKSVVTGETGEILRAKVREMSKNLKSIRDEEMDAVAEELIQLCRNSNKSK

SEQ ID NO: 285 - protein, 442 aa, Artificial Sequence
  engineered beta-1,2-glycosyltransferase encoded in plasmid pA29982
MATNLRVLMFPWLAYGHISPFLNIAKQLADRGFLIYLCSTRINLESIKKKIPEKYADSIHLIELQLPELPELPPHYHTTNGLPPHLNPTLHKALKMSKPNFSRILQNLKPDLLIYDVLQPWAEEVANEQNIPAAKLLTSCAAVFSYFFSFRKNPGVEFPFPAIHLPEVEKVKIREILAKEPEEGGRLDECNKQMMLMCTSRTIEAKYIDYCTELCNWKVVPVGPPFQDPITNDDDNHELIDWLGTKDENSVVFVSFGSEYFLSKEDMEEVAFALELSNVNFIWVVRFPKGEETNLEDALPKGFLERIGERGRVLDKFAPQPRILNHPSTGGFISHCGWNSAMESIQFGVPIIAMPIHNDQPINAKLMVELGVAVEIVRDDDGKIHREEIAETLKSVVTGETGEILRAKVREISKNLKSIRDEEMDEVAEELIQLCRNSNKSK

SEQ ID NO: 286 - protein, 442 aa, Artificial Sequence
  engineered beta-1,2-glycosyltransferase encoded in plasmid pA29983
MATNLRVLMFPWLAYGHISPFLNLAKKLADRGFLIYLCSTRINLESIKKKIPEKYADSIHLIELQLPELPELPPHYHTTNGLPPHLNPTLHKALKMSKPNFSRILQNLKPDLLIYDVLQPWAEHVANEQNIPAAMLLTSSAAVFSYFFHFRKNPGVEFPFPAIHLPEYEKVKIREILAKEPEEGGRLDECNKQMMLMCTSREIEAKYIDYCTELCNKKVVPVGPPVQDLITNDADDKELIDWLGTKHENSVVFVSFGSEYFLSKEDMEEVAFALELSNVNFIWVARFPKGEERNLEDALPKGFLERIGERGRVLEKFAPQPRILNHPSTGGFISHCGWNSAMESIYFGVPIIAMPIHNDQPINAKLMVELGVAVEIVRDDDGKIHRGEIAETLKSVVTGETGEILRAKVREISKNLKSHRDEEMDATVEELIQLCRNSNKSK

SEQ ID NO: 287 - protein, 442 aa, Artificial Sequence
  engineered beta-1,2-glycosyltransferase encoded in plasmid pA29984
MATNLRVLMFPWLAYGHISPFLNIAKQLADRGFLIYLCSTRINLESIKKKIPEKYADSIHLIELQLPEHPELPPHYHTTNGLPPHLNPTLHKALKMSKPNFSRILQNHKPDLLIYDVLQPWAEEVANEQNIPAAKFLTSCAAVFSYFFHFRKNPGVEFPFPAIHLPEVEKVKIREILAKEPEEGGRLRECNHQFMLMCTSRTIEAKYIDYCTELCNWKVVPVGPLIQDLITNDDDNKELIDWLDTKHENSVVFVSFGSEYFLSKEDMEEIAFALELSNVNFIWVARFPKGEERNLEDALPKGFLERIGERGRVLDKFAPQPRILNHPSTGGFISHCGWNSAMESIQFGVPIIAMPIHNDQPINAKLMVELGVAVEIVRDDDGKFHREEIAETLKSVVTGETGEILRAKAREMSKNLKSIRDEEMDAVAEELIQLCRNSNKSK

SEQ ID NO: 288 - protein, 442 aa, Artificial Sequence
  engineered beta-1,2-glycosyltransferase encoded in plasmid pA29985
MATNLRVLMFPWLAYGHISPFLNIAKQLADRGFLIYLCSTRINLESIIKKIPEKYADSIHLIELQLPELPELPPHYHTTNGLPPHLNPTLHKALKMSKPNFSRILQNLKPDLLIYDVLQPWAEEVANEQNIPAGKLLTSCAAVFSYFFHFRKNPGVEFPFPAIHLPEVEKVKIREILAKEPEEGGRLREGNKQMMLMCTSRTIEAKYIDYCTELCNWKVVPVGPPFQDLITNDNDNNELIDWLGTKHENSVVFVSFGSEYFLSKEDMEEVAFALELSNVNFIWVARFPKGEERNLEDALPKGFLERIGERGRVLDKFAPQPRILNHPSTGGFISHCGWNSAMESIYFGVPIIAMPIHNDQPINAKLMVELGVAVEIVRDDDGKIHREEIAETLKSVVTGETGEILRAKVREMSKNLKSIRDEEMDAVAEELIQLCRNSNKSK

SEQ ID NO: 289 - protein, 442 aa, Artificial Sequence
  engineered beta-1,2-glycosyltransferase encoded in plasmid pA29986
MATNLRVLMFPWLAYGHISPFLNLAKQLADRGFHIYLCSTRINLESIKKKIPEKYAKSIHLIELQLPELPELPPHYHTTNGLPPHLNPTLHKALKMSKPNFSNILQNLKPDLLIYDVLQPWAEEVANEQNIPAGKLLTSSAAVFSYFFSFRKNPGVEFPFPKIHLPDIEKRKIREILAKEPEEKGRLNEGNKQMVLMCTSREIEAKYIDYCSELCNWKVVPVGPLVQDLITNDDDDKELMQWLDKKDENSVVFVSFGSEYYLSKEDMEEVAHALELSNVNFIWVARFPKGEETNLEEALPKGFLERIKDRGRVLEKFAPQPRILAHPSTGGFISHCGWNSAMESIHFGVPIIAMPIHNDQPINAKLMVELGVAVEIVRDDDGKFHREEIAEVIKSVVTGETGEELRRKVREISKKLKSRRDEEMDNVVEELIQLCRNSNKSK

SEQ ID NO: 290 - protein, 442 aa, Artificial Sequence
  engineered beta-1,2-glycosyltransferase encoded in plasmid pA29987
MATNLRVLMFPWLAYGHISPFLNLAKQLADRGFHIYLCSTRINLESIKKKIPEKYAQSIHLIELQLPELPELPPHYHTTNGLPPHLNPTLHKALKMAKPNFSNILQNLKPDLLIYDVLQPWAEEVASEQNIPAAKLLTSSAAVFAYFFSFRKNPGIEFPFPKIHLPDIEERKIREILAKKPEEKGRLNEGNCDMVLMCTSREIEAKYIDYCSELCNWKVVPVGPLVQDLITNDDDDKELMQWLDKKDPHSVVFVSFGSEYFLSKEDMEEVAHGLELSNVNFIWVARFPKGEETNLEEALPKGFLERIKDRGMVLEKFAPQPRILAHPSTGGFISHCGWNSAMESIKFGVPIIAMPIHNDQPINAKLMVELGVAVEIVRDDNGKFHREEIAEVLKKVVTGETGEELRKKVRELSEKLKSQCDEEMDEVVEELIQLCRNSNKSK

SEQ ID NO: 291 - protein, 442 aa, Artificial Sequence
  engineered beta-1,2-glycosyltransferase encoded in plasmid pA29989
MATNLRVLMFPWLAYGHISPFLNLAKQLTDRGFQIYLCSTRINLESIKKKIPEKYAQSIHLIELQLPELPELPPHYHTTNGLPPHLNPTLHKALKMAAPNFSNILQNLKPDLLIYDVLQPWAEEVASEQNIPAVKLLTSCAAVFAYFFSFRKNPGVEFPFPEIHLPDIEERKIREILAKEPEEKGRLLEGNCDIMLMCTSREIEAKYIDYCSELCNWKVVPVGPLVQDLITEDEDWKELMQWLNKKPPNSVVFVSFGSEYFLSKEDMEELAHALELSNVNFIWVVRFPKGEEINLEEALPKGFLERIKDRGMVLEKFAPQPRILAHPSTGGFISHCGWNSAMESIKFGVPIIAMPIHNDQPINAKLLVELGVAVEIVRDDNGKFHREEIAEVIKKVMTGETGEELRKKVREISEKLKSQRDEEMDQVVEELIQLCRNSNKSK

SEQ ID NO: 292 - protein, 442 aa, Artificial Sequence
  engineered beta-1,2-glycosyltransferase encoded in plasmid pA29990
MATNLRVLMFPWLAYGHISPFLNLAKQLTDRGFHIYLCSTRINLESIHKKIPEKYAQSIHLIELQLPELPELPPHYHTTNGLPPHLNPTLHKALKMAAPQFSNILQNLKPDLLIYDVLQPWAEEVASEQNIPAVKLLTSCAAVFAYFFSFRKNPGVEFPFPAIHLPDYEERKIREILAKEPEEKGRLLEGNCQIMLMCTSREIEAKYIDYCSELCNWKVVPVGPLVQDLITNDEDWKELMQWLDKKPPNSVVFVSFGSEYFLSKEDMEELAHALELSNVNFIWVVRFPKGEEINLEEALPKGFLERIKDRGMVLEKFAPQPRILAHPSTGGFISHCGWNSAMESIKFGVPIIAMPIHNDQPINAKLLVELGVAVEIVRDDNGKFHREEIAEVIKKVMTGETGEELRKKVREISEKLKSQRDEEMDQVVEELIQLCRNSNKSK

SEQ ID NO: 293 - protein, 442 aa, Artificial Sequence
  engineered beta-1,2-glycosyltransferase encoded in plasmid pA29991
MATNLRVLMFPWLAYGHISPFLNLAKQLTDRGFLIYLCSTRINLESIKKKIPEKYAQSIHLIELQLPELPELPPHYHTTNGLPPHLNPTLHKALKMAAPEFSKILQNLKPDLLIYDVLQPWAEEVASEQNIPAVKLLTSCAAVFAYFFSFRKNPGVEFPFPAIHLPDYEERKIREILAKEPEEKGRLLEGNCDIMLMCTSREIEAKYIDYCSELCNWKVVPVGPLVQDLITEDEDWKELMQWLNKKPPNSVVFVSFGSEYFLSKEDMEELAHALELSNVNFIWVLRFPKGEEINLEEALPKGFLERIKDRGMVLEKFAPQPRILAHPSTGGFISHCGWNSAMESIKFGVPIIAMPIHNDQPINAKLLVELGVAVEIVRDDNGKFHREEIAEVIKKVMTGETGEELRKKVREISEKLKSQRDEEMDQVVEELIQLCRNSNKSK

SEQ ID NO: 294 - protein, 442 aa, Artificial Sequence
  engineered beta-1,2-glycosyltransferase encoded in plasmid pA29992
MATNLRVLMFPWLAYGHISPFLNLAKQLTDRGFLIYLCSTRINLESIHKKIPEKYAQSIHLIELQLPELPELPPHYHTTNGLPPHLNPTLHKALKMAAPQFSNILQNLKPDLLIYDVLQPWAEEVASEQNIPAVKLLTSCAAVFAYFFSFRKNPGVEFPFPEIHLPDIEERKIREILAKEPEEKGRLLEGNCQIMLMCTSREIEAKYIDYCSELCNWKVVPVGPLVQDLITEDEDWKELMQWLDKKPPNSVVFVSFGSEYFLSKEDMEELAHALELSNVNFIWVVRFPKGEEINLEEALPKGFLERIKDRGMVLEKFAPQPRILAHPSTGGFISHCGWNSAMESIKFGVPIIAMPIHNDQPINAKLLVELGVAVEIVRDDNGKFHREEIAEVIKKVMTGETGEELRKKVREISEKLKSTRDEEMDNVVEELIQLCRNSNKSK

SEQ ID NO: 295 - protein, 442 aa, Artificial Sequence
  engineered beta-1,2-glycosyltransferase encoded in plasmid pA29993
MATNLRVLMFPWLAYGHISPFLNLAKQLTDRGFLIYLCSTRINLESIRKKIPEKYAQSIHLIELQLPELPELPPHYHTTNGLPPHLNPTLHKALKMAAPNFSNILQNLKPDLLIYDVLQPWAEKVASEQNIPAVKLLTSCAAVFAYFFSFRKNPGVEFPFPEIHLPDIEERKIREILAKEPEEKGRLLEGNCQIMLMCTSREIEAKYIDYCSELCNWKVVPVGPLVQDLITNDEDWKELMQWLDKKPPNSVVFVSFGSEYFLSKEDMEELAHALELSNVNFIWVLRFPKGEEINLEEALPKGFLERIKDRGMVLEKFAPQPRILRHPSTGGFISHCGWNSAMESIRFGVPIIAMPIHNDQPINAKLLVELGVAVEIVRDDNGKFHREEIAEVIKKVMTGETGEELRKKVREISEKLKSQRDEEMDQVVEELIQLCRNSNKSK

SEQ ID NO: 296 - protein, 442 aa, Artificial Sequence
  engineered beta-1,2-glycosyltransferase encoded in plasmid pA29994
MATNLRVLMFPWLAYGHISPFLNLAKQLTDRGFLIYLCSTRINLESIKKKIPEKYAQSIHLIELQLPELPELPPHYHTTNGLPPHLNPTLHKALKMAAPEFSKILQNLKPDLLIYDVLQPWAEEVASEQNIPAVKLLTSCAAVFAYFFSFRKNPGVEFPFPEIHLPDIEERKIREILAKEPEEKGRLLEGNCQIMLMCTSREIEAKYIDYCSELCNWKVVPVGPLVQDLITEDEDWKELMQWLNKKPPNSVVFVSFGSEYFLSKEDMEELAHALELSNVNFIWVLRFPKGEEINLEEALPKGFLERIKDRGMVLEKFAPQPRILAHPSTGGFISHCGWNSAMESIRFGVPIIAMPIHNDQPINAKLLVELGVAVEIVRDDNGKFHREEIAEVIKKVMTGETGEELRKKVREISEKLKSQRDEEMDNVVEELIQLCRNSNKSK

SEQ ID NO: 297 - protein, 442 aa, Artificial Sequence
  engineered beta-1,2-glycosyltransferase encoded in plasmid pA29995
MATNLRVLMFPWLAYGHISPFLNLAKQLADRGFHIYLCSTRINLESIKKKIPEKYADSIHLIELQLPELPELPPHYHTTNGLPPHLNPTLHKALKMSKPNFSNILQNLKPDLLIYDVLQPWAEEVANEQNIPAGKLLTSSAAVFSYFFSFRKNPGVEFPFPAIHLPDVEKRKIREILAKEPEEKGRLDEGNKQMVLMCTSREIEAKYIDYCSELCNWKVVPVGPLVQDLPTNDDDDKELMQWLDKKDENSVVFVSFGSEYFLSKEDMEEVAHALELSNVNFIWVARFPKGEETNLEDALPKGFLERIGERGVVLEKFAPQPRILAHPSTGGFISHCGWNSAMESIHFGVPIIAMPIHNDQPINAKLMVELGVAVEIVRDDDGKFHREEIAEVIKSVVTGETGEELRRKVREISKKLKSKRDEEMDAVVEELIQLCRNSNKSK

SEQ ID NO: 298 - protein, 442 aa, Artificial Sequence
  engineered beta-1,2-glycosyltransferase encoded in plasmid pA29996
MATNLRVLMFPWLAYGHISPFLNLAKQLADRGFHIYLCSTRINLESIKKKIPEKYADSIHLIELQLPELPELPPHYHTTNGLPPHLNPTLHKALKMSKPNFSNILQNLKPDLLIYDVLQPWAEEVANEQNIPAAKLLTSSAAVFSYFFSFRKNPGVEFPFPAIHLPDVEERKIREILAKEPEEKGRLNEGNKQMVLMCTSRTIEAKYIDYCSELCNWKVVPVGPLVQDLPTNDDDDKELMKWLDKKDPNSVVFVSFGSEYFLSKEDMEEVAHALELSNVNFIWVARFPKGEETNLEDALPKGFLERIGERGVVLEKFAPQPRILAHPSTGGFISHCGWNSAMESIQFGVPIIAMPIHNDQPINAKLMVELGVAVEIVRDDDGKIHREEIAETLKSVVTGETGEELRKKVREISKKLKSKRDEEMDEVVEELIQLCRNSNKSK

SEQ ID NO: 299 - protein, 442 aa, Artificial Sequence
  engineered beta-1,2-glycosyltransferase encoded in plasmid pA29997
MATNLRVLMFPWLAYGHISPFLNLAKQLADRGFLIYLCSTRINLESIKKKIPEKYADSIHLIELQLPELPELPPHYHTTNGLPPHLNPTLHKAFKMSAPNFSNILQNLKPDLLIYDVLQPWAEEVANEQNIPAVKLLTSCAAVFSYFFSFRKNPGVEFPFPAIHLPDVEERKIREILAKEPEEKGRLNEGNYQIMLMCTSRTIEAKYIDYCSELCNWKVVPVGPLFQDLITNDEDDKELMKWLDKKPPNSVVFVSFGSEYFLSKEDMEEVAHALELSNVNFIWVLRFPKGEEINLEDALPKGFLERIGERGVVLEKFAPQPRILAHPSTGGFISHCGWNSAMESIYFGVPIIAMPIHNDQPINAKLLVELGVAVEIVRDDDGKIHREEIAETLKSVVTGETGEELRKKVREISKKLKSIRDEEMDNVVEELIQLCRNSNKSK

SEQ ID NO: 300 - protein, 442 aa, Artificial Sequence
  engineered beta-1,2-glycosyltransferase encoded in plasmid pA29998
MATNLRVLMFPWLAYGHISPFLNLAKQLADRGFHIYLCSTRINLESIKKKIPEKYADSIHLIELQLPELPELPPHYHTTNGLPPHLNPTLHKALKMSKPNFSRILQNLKPDLLIYDVLQPWAEEVANEQNIPAGKLLTSCAAVFSYFFSFRKNPGVEFPFPAIHLPEVEKRKIREILAKEPEEGGRLDEGNKQMVLMCTSREIEAKYIDYCSELCNWKVVPVGPLVQDLPTNDDDNKELIQWLDTKDENSVVFVSFGSEYFLSKEDMEEVAHALELSNVNFIWVARFPKGEETNLEDALPKGFLERIGERGRVLDKFAPQPRILAHPSTGGFISHCGWNSAMESIHFGVPIIAMPIHNDQPINAKLMVELGVAVEIVRDDDGKFHREEIAEVIKSVVTGETGEILRRKVREISKNLKSIRDEEMDAVVEELIQLCRNSNKSK

SEQ ID NO: 301 - protein, 442 aa, Artificial Sequence
  engineered beta-1,2-glycosyltransferase encoded in plasmid pA30000
MATNLRVLMFPWLAYGHISPFLNLAKQLADRGFLIYLCSTRINLESIKKKIPEKYADSIHLIELQLPELPELPPHYHTTNGLPPHLNPTLHKALKMSKPNFSNILQNLKPDLLIYDVLQPWAEEVANEQNIPAVKLLTSCAAVFSYFFSFRKNPGVEFPFPAIHLPEVEERKIREILAKEPEEKGRLNEGNKQMMLMCTSRTIEAKYIDYCSELCNWKVVPVGPPFQDLITNDEDDKELMQWLNTKDEHSVVFVSFGSEYFLSKEDMEEVAHALELSNVNFIWVLRFPKGEEINLEDALPKGFLERIGERGRVLEKFAPQPRILAHPSTGGFISHCGWNSAMESIYFGVPIIAMPIHNDQPINAKLMVELGVAVEIVRDDDGKIHREEIAETLKSVVTGETGEELRKKVREISKKLKSIRDEEMDNVVEELIQLCRNSNKSK

SEQ ID NO: 302 - protein, 442 aa, Artificial Sequence
  engineered beta-1,2-glycosyltransferase encoded in plasmid pA30001
MATNLRVLMFPWLAYGHISPFLNLAKQLADRGFLIYLCSTRINLESIKKKIPEKYADSIHLIELQLPELPELPPHYHTTNGLPPHLNPTLHKALKMSKPNFSRILQNLKPDLLIYDVLQPWAEEVANEQNIPAGKLLTSCAAVFSYFFSFRKNPGVEFPFPAIHLPEVEKVKIREILAKEPEEGGRLDEGNKQMVLMCTSRTIEAKYIDYCTELCNWKVVPVGPPFQDLPTNDDDNKELIDWLDTKHEHSVVFVSFGSEYFLSKEDMEEVAFALELSNVNFIWVARFPKGEETNLEDALPKGFLERIGERGRVLDKFAPQPRILNHPSTGGFISHCGWNSAMESIYFGVPIIAMPIHNDQPINAKLMVELGVAVEIVRDDDGKIHREEIAETIKSVVTGETGEILRAKVREISKNLKSIRDEEMDAVVEELIQLCRNSNKSK

SEQ ID NO: 303 - protein, 442 aa, Artificial Sequence
  engineered beta-1,2-glycosyltransferase encoded in plasmid pA30002
MATNLRVLMFPWLAYGHISPFLNLAKQLADRGFHIYLCSTRINLESIKKKIPEKYADSIHLIELQLPELPELPPHYHTTNGLPPHLNPTLHKALKMSKPEFSRILQNLKPDLLIYDVLQPWAEEVANEQNIPAVKLLTSCAAVFSYFFSFRKNPGVEFPFPAIHLPEVEEKKIREILAKEPEEGGRLDEGNKQMMLMCTSRTIEAKYIDYCSELCNWKVVPVGPPFQDLPTNDDDNKELMQWLDTKEEHSVVFVSFGSEYFLSKEDMEEVAHALELSNVNFIWVARFPKGEETNLEDALPKGFLERIGERGRVLDKFAPQPRILAHPSTGGFISHCGWNSAMESIHFGVPIIAMPIHNDQPINAKLMVELGVAVEIVRDDDGKIHREEIAETLKSVVTGETGEILRRKVREISKNLKSKRDEEMDAVAEELIQLCRNSNKSK

SEQ ID NO: 304 - protein, 442 aa, Artificial Sequence
  engineered beta-1,2-glycosyltransferase encoded in plasmid pA30003
MATNLRVLMFPWLAYGHISPFLNLAKQLADRGFLIYLCSTRINLESIKKKIPEKYADSIHLIELQLPELPELPPHYHTTNGLPPHLNPTLHKALKMSKPNFSRILQNLKPDLLIYDVLQPWAEEVANEQNIPAVKLLTSCAAVFSYFFSFRKNPGVEFPFPAIHLPEVEEKKIREILAKEPEEGGRLDEGNKQMMLMCTSRTIEAKYIDYCSELCNWKVVPVGPPFQDLITNDDDNKELMQWLNTKEENSVVFVSFGSEYFLSKEDMEEVAHALELSNVNFIWVARFPKGEETNLEDALPKGFLERIGERGRVLDKFAPQPRILAHPSTGGFISHCGWNSAMESIHFGVPIIAMPIHNDQPINAKLMVELGVAVEIVRDDDGKIHREEIAETLKSVVTGETGEILRRKVREISKNLKSKRDEEMDAVAEELIQLCRNSNKSK

SEQ ID NO: 305 - protein, 442 aa, Artificial Sequence
  engineered beta-1,2-glycosyltransferase encoded in plasmid pA30004
MATNLRVLMFPWLAYGHISPFLNIAKQLADRGFLIYLCSTRINLESIIEKIPEKYADSIHLIELQLPELPELPPHYHTTNGLPPHLNPTLHKALKMSKPNFSRILQDLKPDLLIYDVLQPWAEHVANEQDIPAGKLLTSCAAVFSYFFSFRKNPGVEFPFPAIHLPEVEEVEIREILAKEPEEGGRLDEGNKQMMLMCTSRTIEAKYIDYCTELCNWKVVPVGPPFQDLITDDADDKELIDWLGTKHENSTVFVSFGSEYFLSKEDMEEVAFALELSDVNFIWVARFPKGEERNLEDALPEGFLERIGERGRVLDKFAPQPRILNHPSTGGFISHCGWNSAMESIDFGVPIIAMPIHNDQPINAKLMVELGVAVEIVRDDDGKIHRGEIAETLKSVVTGETGEILRAKVREISENLKSIEDEEMDAVAEELIQLCRNSNESK

SEQ ID NO: 306 - protein, 442 aa, Artificial Sequence
  engineered beta-1,2-glycosyltransferase encoded in plasmid pA30005
MATNLRVLMFPWLAYGHISPFLNIAKQLADRGFLIYLCSTRINLKSIIKKIPEKYADSIHLIELQLPELPELPPHYHTTNGLPPHLNPTLHKALKMSKPNFSRILQKLKPDLLIYDVLQPWAEHVANEQKIPAGKLLTSCAAVFSYFFSFRKNPGVEFPFPAIHLPKVKKVKIREILAKEPEEGGRLDEGNKQMMLMCTSRTIEAKYIDYCTKLCNWKVVPVGPPFQDLITKKADKKKLIDWLGTKHKNSTVFVSFGSEYFLSKEDMEEVAFALELSKVNFIWVARFPKGEKRNLEKALPKGFLKRIGKRGRVLDKFAPQPRILNHPSTGGFISHCGWNSAMESIDFGVPIIAMPIHNDQPINAKLMVELGVAVEIVRDKKGKIHRGEIAKTLKSVVTGKTGKILRAKVRKISKNLKSIRDKEMDAVAEELIQLCRNSNKSK

SEQ ID NO: 307 - protein, 442 aa, Artificial Sequence
  engineered beta-1,2-glycosyltransferase encoded in plasmid pA30006
MATNLRVLMFPWLAYGHISPFLNIAKQLADRGFLIYLCSTRINLESIIEKIPEKYADSIHLIELQLPELPELPPHYHTTNGLPPHLNPTLHKALKMSKPNFSEILQDLKPDLLIYDVLQPWAEHVANEQDIPAGKLLTSCAAVFSYFFSFRKNPGVEFPFPAIHLPEVEEVEIREILAEEPEEGGRLDEGNKQMMLMCTSRTIEAKYIDYCTELCNWKVVPVGPPFQDLITDDADDKELIDWLGTKHENSTVFVSFGSEYFLSKEDMEEVAFALELSDVNFIWVARFPEGEEEDLEDALPEGFLERIGERGRVLDKFAPQPRILNHPSTGGFISHCGWNSAMESIDFGVPIIAMPIHNDQPINAKLMVELGVAVEIVRDDDGKIHRGEIAETLKSVVTGETGEILRAKVREISENLKSIEDEEMDAVAEELIQLCRNSNESK

SEQ ID NO: 308 - protein, 442 aa, Artificial Sequence
  engineered beta-1,2-glycosyltransferase encoded in plasmid pA30007
MATNLRVLMFPWLAYGHISPFLNIAKQLAKRGFLIYLCSTRINLKSIIKKIPEKYADSIHLIELQLPELPELPPHYHTTNGLPPHLNPTLHKALKMSKPNFSRILQKLKPDLLIYDVLQPWAEHVANEQKIPAGKLLTSCAAVFSYFFSFRKNPGVKFPFPAIHLPKVKKVKIREILAKEPEEGGRLDEGNKQMMLMCTSRTIEAKYIDYCTKLCNWKVVPVGPPFQKLITKKADKKKLIDWLGTKHKNSTVFVSFGSEYFLSKKDMEEVAFALELSKVNFIWVARFPKGEKRKLEKALPKGFLKRIGKRGRVLDKFAPQPRILNHPSTGGFISHCGWNSAMESIDFGVPIIAMPIHNDQPINAKLMVELGVAVEIVRDKKGKIHRGEIAKTLKSVVTGKTGKILRAKVRKISKNLKSIRDKEMDAVAEELIQLCRNSNKSK

SEQ ID NO: 309 - protein, 442 aa, Artificial Sequence
  engineered beta-1,2-glycosyltransferase encoded in plasmid pA30008
MATNLRVLMFPWLAYGHISPFLNIAKQLADRGFLIYLCSTRINLESIIEKIPEKYADSIHLIELQLPELPELPPHYHTTNGLPPHLNPTLHKALKMSKPDFSEILQDLKPDLLIYDVLQPWAEHVANEQDIPAGKLLTSCAAVFSYFFSFRKNPGVEFPFPAIHLPEVEEVEIREILAEEPEEGGRLDEGNKQMMLMCTSETIEAKYIDYCTELCNWKVVPVGPPFQDLITDDADDEELIDWLGTKHENSTVFVSFGSEYFLSKEDMEEVAFALELSDVNFIWVARFPEGEEEDLEDALPEGFLERIGERGRVLDKFAPQPRILNHPSTGGFISHCGWNSAMESIDFGVPIIAMPIHNDQPINAELMVELGVAVEIVRDDDGEIHRGEIAETLKSVVTGETGEILRAKVREISENLKSIEDEEMDAVAEELIELCRNSDESK

SEQ ID NO: 310 - protein, 442 aa, Artificial Sequence
  engineered beta-1,2-glycosyltransferase encoded in plasmid pA30009
MATNLRVLMFPWLAYGHISPFLNIAKQLAKRGFLIYLCSTRINLKSIIKKIPEKYADSIHLIELQLPELPELPPHYHTTNGLPPHLNPTLHKALKMSKPNFSRILQKLKPDLLIYDVLQPWAEHVANEQKIPAGKLLTSCAAVFSYFFSFRKNPGVKFPFPAIHLPKVKKVKIREILAKKPEEGGRLDEGNKQMMLMCTSRTIEAKYIDYCTKLCNWKVVPVGPPFQKLITKKADKKKLIKWLGTKHKNSTVFVSFGSEYFLSKKDMEEVAFALELSKVNFIWVARFPKGEKRKLEKALPKGFLKRIGKRGRVLDKFAPQPRILNHPSTGGFISHCGWNSAMESIDFGVPIIAMPIHNDQPINAKLMVKLGVAVEIVRKKKGKIHRGEIAKTLKSVVTGKTGKILRAKVRKISKNLKSIRDKEMDAVAEELIQLCRNSNKSK

SEQ ID NO: 311 - protein, 442 aa, Artificial Sequence
  engineered beta-1,2-glycosyltransferase encoded in plasmid pA30010
MDENLRVLMFPWLAYGHISPFLNIAKQLADRGFLIYLCSTRINLESIIKKIPEKYADSIHLIELQLPELPELPPHYHTTNGLPPHLNPTLHKALKMSKPNFSRELQNLKPDLLIYDVLQPWAEHVANEQNIPAGKLLTSCAAVFSYFFSFRKNPGVEFPEPEIHLPEVEKVKIREILAKEPEEGGRLDEGNKQMMLMCTSRTIEAKYIDYCTELCNWKVVPVGPPFQDLITEDADNDELIDWLGTKHENSTVFVSFGSEYFLSKEDMEEVAFALELSDVNFIWVARFPEGEERNLEDALPKGFLERIGERGRVLDKFAPQPRILNHPSTGGFISHCGWNSAMESIDFGVPIIAMPIHNDQPINAKLMVELGVAVEIVRDDDGKIHRGEIEETLKSVVTGETGEILRAKVREISKNLKSIRDEEMDAVAEELIQLCRNSNKSK

SEQ ID NO: 312 - protein, 442 aa, Artificial Sequence
  engineered beta-1,2-glycosyltransferase encoded in plasmid pA30011
MKKNLRVLMFPWLAYGHISPFLNIAKQLADRGFLIYLCSTRIKLESIIKKIPEKYARSKHLIELQLPELPELPPHKRTTNGLPPHLNPTLHKALKMSKPNKSRKLQNLKPDLLIYDVLQPWAEHVAREQNIPAGKLLTSCAAVFSYFFSFRKNPGVEFPKPKIHKPKVEKVKIREILAKEPEEGGRLDEGNKQMMLMCTSRTIERKYIDYCTELCNWKVVPVGPPFQDLITKDADNKELIDWLGTKHKNSTVFVSFGSEYFLSKEDMEEVAFALELSKVNFIWVARFPKGEKRNLEDALPKGFLERIGERGRVLDKFAPQPRILNHPSTGGFISHCGWNSAMESIDFGVPIIAMPIHNDQPINAKLMVKLGVAVEIRRDKDGKIHRGEIRETLKSVVTGETGEILRAKVREISKRLKSIRDEEMDAVAEELIQLCRNSNKSK

SEQ ID NO: 313 - protein, 442 aa, Artificial Sequence
  engineered beta-1,2-glycosyltransferase encoded in plasmid pA30012
MDENLRVLMFPWLAYGHISPFLNIAKQLADRGFLIYLCSTRINLESIIKKIPEKYADSIHLIELQLPELPELPPHYHTTNGLPPHLNPTLHKALKMSKPNFSRELQNLKPDLLIYDVLQPWAEHVANEQNIPAGKLLTSCAAVFSYFFSFRKNPGVEFPEPEIHLPEVEKVKIREILAKEPEEGGRLDEGNKQMMLMCTSRTIEAKYIDYCTELCNWKVVPVGPPFQDLITEDADNDELIDWLGTKHENSTVFVSFGSEYFLSKEDMEEVAFALELSDVNFIWVARFPEGEERNLEDALPKGFLERIGERGRVLDKFAPQPRILNHPSTGGFISHCGWNSAMESIDFGVPIIAMPIHNDQPINAKLMVELGVAVEIERDDDGKIHRGEIEETLKSVVTGETGEILRAKVREISKNLKSIRDEEMDAVAEELIQLCRNSNKSK

SEQ ID NO: 314 - protein, 442 aa, Artificial Sequence
  engineered beta-1,2-glycosyltransferase encoded in plasmid pA30013
MKKNLRVLMFPWLAYGHISPFLNIAKQLADRGFLIYLCSTRIKLESIIKKIPEKYARSKHLIELQLPELPELPPHKRTTNGLPPHLNPTLHKALKMSKPNKSRKLQNLKPDLLIYDVLQPWAEHVAREQNIPAGKLLTSCAAVFSYFFSFRKNPGREFPKPKIHKPKVEKVKIREILAKEPEEGGRLDEGNKQMMLMCTSRTIERKYIDYCTELCNWKVVPVGPPFQDLITKDADNKELIDWLGTKHKNSTVFVSFGSEYFLSKEDMEEVAFALELSKVNFIWVARFPKGEKRNLEDALPKGFLERIGERGRVLDKFAPQPRILNHPSTGGFISHCGWNSAMESIDFGVPIIAMPIHNDQPINAKLMVKLGVAVEIRRDKDGKIHRGEIRETLKSVVTGETGEILRAKVREISKRLKSIRDEEMDAVAEELIQLCRNSNKSK

SEQ ID NO: 315 - protein, 442 aa, Artificial Sequence
  engineered beta-1,2-glycosyltransferase encoded in plasmid pA30014
MKKNLRVLMFPWLAYGHISPFLNIAKQLADRGFLIYLCSTRIKLESIIKKIPEKYARSKHLIELQLPELPELPPHKRTTNGLPPHLNPTLHKALKMSKPNKSRKLQNLKPDLLIYDVLQPWAEHVAREQNIPAGKLLTSCAAVFSYFFSFRKNPGREFPKPKIHKPKVEKVKIREILAKEPEEGGRLDEGNKQMMLMCTSRTIERKYIDYCTELCNWKVVPVGPPFQDLITKDADNKELIDWLGTKHENSTVFVSFGSEYFLSKEDMEEVAFALELSKVNFIWVARFPKGEKRNLEDALPKGFLERIGERGRVLDKFAPQPRILNHPSTGGFISHCGWNSAMESIDFGVPIIAMPIHNDQPINAKLMVKLGVAVEIRRDKDGKIHRGEIRETLKSVVTGETGEILRAKVREISKRLKSIRDEEMDAVAEELIQLCRNSNKSK

SEQ ID NO: 316 - protein, 442 aa, Artificial Sequence
  engineered beta-1,2-glycosyltransferase encoded in plasmid pA29705
MATNLRVLMFPWLAYGHISPFLNIAKQLADRGFLIYLCSTRINLESIIKKIPEKYADSIHLIELQLPELPELPPHYHTTNGLPPHLNPTLKKALKMSKPNFSRILQNLKPDLVIYDVLQPWAEHVANEQNIPAVKLLTSCAAVFSYFFNFVKNPGVEFPFPAIHLPEVEKVKIREILAKEPEEKDRFAEGNKQMMLMCTSRTIEAKYIDYLSELSNWKVVPVGPPFQDLITNDADNKELIDWLGTKHENSTVFVSFGSEYFLSKEDMEEIAFGLELSNVNFIWVVRFPKGEERNLEDALPKGFLERIGERGRVLDKFAPQPRILNHPSTGGFISHCGWNSAMESIDFGVPIIAMPIHNDQPINARLMVELGVAVEIVRDDDGKIHRGEIAETLKDVITGETGEILRAKVREISKNLKSIRDEEMDAVAEELIQLCRNSNKSK

SEQ ID NO: 317 - protein, 442 aa, Artificial Sequence
  engineered beta-1,2-glycosyltransferase encoded in plasmid pA29706
MATNLRVLMFPWLAYGHISPFLNIAKQLADRGFLIYLCSTRINLESIIKKIPEKYADSIHLIELQLPELPELPPHYHTTNGLPPHLNPTLQKALKMSKPNFSRILQNLKPDLVIYDVLQPWAEHVANEQNIPAVKLLTSCAAVFSYFFNFVKNPGVEFPFPAIHLPEVEKVKIREILAKEPEDKDRFAEGNKQMMLMCTSRTIEAKYIDYLTELSNWKVVPVGPPFQDLITNDADNKELIDWLGTKHENSTVFVSFGSEYFLSKEDMEEVAFGLELSNVNFIWVVRFPKGEERNLEDALPKGFLERIGERGRVLDKFAPQPRILNHPSTGGFISHCGWNSAMESIDFGVPIIAMPIHNDQPINARLMVELGVAVEIVRDDDGKIHREEIAETLKGVITGETGEILRAKVREISKNLKSIRDEEMDAVAEELIQLCRNSNKSK

SEQ ID NO: 318 - protein, 442 aa, Artificial Sequence
  engineered beta-1,2-glycosyltransferase encoded in plasmid pA29707
MATNLRVLMFPWLAYGHISPFLNIAKQLADRGFLIYLCSTRINLESIIKKIPEKYADSIHLIELQLPELPELPPHYHTTNGLPPHLNPTLKKALKMSKPNFSRILQNLKPDLLIYDVLQPWAEHVANEQNIPAVKFLTSCAAVFSYFFNFVKNPGVEFPFPAIHLPEVEKVKIREILAKEPEEKDRFAEGNKQMMLMCTSRTIEAKYIDYLSELSNWKVVPVGPPFQDLITNDADNKELIDWLGTKHENSTVFVSFGSEYFLSKEDMEEIAFGLELSNVNFIWVVRFPKGEERNLEDALPKGFLERIGERGRVLDKFAPQPRILNHPSTGGFISHCGWNSAMESIDFGVPIIAMPIHNDQPINARLIVELGVAVEIVRDDDGKIHRGEIAETLKEVITGETGEILRAKVREISKNLKSIRDEEMDAVAEELIQLCRNSNKSK

SEQ ID NO: 319 - protein, 442 aa, Artificial Sequence
  engineered beta-1,2-glycosyltransferase encoded in plasmid pA29708
MATNLRVLMFPWLAYGHISPFLNIAKQLADRGFLIYLCSTRINLESIIKKIPEKYADSIHLIELQLPELPELPPHYHTTNGLPPHLNPTLKKALKMSKPNFSRILQNLKPDLVIYDVLQPWAEHVANEQNIPAVKLLTSCAAVFSYFFNFVKNPGVEFPFPAIHLPEVEKVKIREILAKEPEEKDRFAEGNKQMMLMCTSRTIEAKYIDYLSELSNWKVVPVGPPFQDLITNDADNKELIDWLGTKHENSTVFVSFGSEYFLSKEDMEEIAFGLELSNVNFIWVVRFPKGEERNLEDALPKGFLERIGERGRVLDKFAPQPRILNHPSTGGFISHCGWNSVMESIDFGVPIIAMPIHNDQPINARLMVELGVAVEIVRDDDGKIHRGEIAETLKDVITGETGEILRAKVREISKNLKSIRDEEMDAVAEELIQLCRNSNKSK

SEQ ID NO: 320 - protein, 442 aa, Artificial Sequence
  engineered beta-1,2-glycosyltransferase encoded in plasmid pA29709
MATNLRVLMFPWLAYGHISPFLNIAKQLADRGFLIYLCSTRINLESIIKKIPEKYADSIHLIELQLPELPELPPHYHTTNGLPPHLNPTLKKALKMSKPNFSRILQNLKPDLVIYDVLQPWAEHVANEQNIPAVKFLTSCAAVFSYFFNFVKNPGVEFPFPAIHLPEVEKVKIREILAKEPEDKDRFAEGNKQMMLMCTSRTIEAKYIDYLTELSNWKVVPVGPPFQDLITNDADNKELIDWLGTKHENSTVFVSFGSEYFLSKEDMEEVAFGLELSNVNFIWVVRFPKGEERNLEDALPKGFLERIGERGRVLDKFAPQPRILNHPSTGGFVSHCGWNSVMESIDFGVPIIAMPIHNDQPINARLIVELGVAVEIVRDDDGKIHRGEIAETLKGVITGETGEILRAKVREISKNLKSIRDEEMDAVAEELIQLCRNSNKSK

SEQ ID NO: 321 - protein, 442 aa, Artificial Sequence
  engineered beta-1,2-glycosyltransferase encoded in plasmid pA29710
MATNLRVLMFPWLAYGHISPFLNIAKQLADRGFLIYLCSTRINLESIIKKIPEKYADSIHLIELQLPELPELPPHYHTTNGLPPHLNPTLKKALKMSKPNFSRILQNLKPDLLIYDVLQPWAEHVANEQNIPAVKLLTSCAAVFSYFFHFVKNPGVEFPFPAIHLPEVEKVKIREILAKEPEEKDRFAEGNKQMMLMCTSRTIEAKYIDYLSELSNWKVVPVGPPFQDLITNDADNKELIDWLGTKHENSTVFVSFGSEYFLSKEDMEEIAFGLELSNVNFIWVVRFPKGEERNLEDALPKGFLERIGERGRVLDKFAPQPRILNHPSTGGFVSHCGWNSVMESIDFGVPIIAMPIHNDQPINARLMVELGVAVEIVRDDDGKIHREEIAEVLKDVITGETGEILRAKVREISKNLKSIRDEEMDAVAEELIQLCRNSNKSK

SEQ ID NO: 322 - protein, 442 aa, Artificial Sequence
  engineered beta-1,2-glycosyltransferase encoded in plasmid pA29711
MATNLRVLMFPWLAYGHISPFLNIAKQLADRGFLIYLCSTRINLESIIKKIPEKYADSIHLIELQLPELPELPPHYHTTNGLPPHLNPTLHKALKMSKPNFSRILQNLKPDLLIYDVLQPWAEHVANEQNIPAGKLLTSCAAVFSYFFNFVKNPGVEFPFPAIHLPEVEKVKIREILAKEPEEKDRFAEGNKQMMLMCTSRTIEAKYIDYLSELSNWKVVPVGPPFQDLITNDADNKELIDWLGTKHENSTVFVSFGSEYFLSKEDMEEIAFGLELSNVNFIWVARFPKGEERNLEDALPKGFLERIGERGRVLDKFAPQPRILNHPSTGGFISHCGWNSAMESIDFGVPIIAMPIHNDQPINARLMVELGVAVEIVRDDDGKIHRGEIAETLKDVITGETGEILRAKVREISKNLKSIRDEEMDAVAEELIQLCRNSNKSK

SEQ ID NO: 323 - protein, 442 aa, Artificial Sequence
  engineered beta-1,2-glycosyltransferase encoded in plasmid pA29712
MATNLRVLMFPWLAYGHISPFLNIAKQLADRGFLIYLCSTRINLESIIKKIPEKYADSIHLIELQLPELPELPPHYHTTNGLPPHLNPTLHKALKMSKPNFSRILQNLKPDLLIYDVLQPWAEHVANEQNIPAGKLLTSCAAVFSYFFNFVKNPGVEFPFPAIHLPEVEKVKIREILAKEPEDKDRFAEGNKQMMLMCTSRTIEAKYIDYLTELSNWKVVPVGPPFQDLITNDADNKELIDWLGTKHENSTVFVSFGSEYFLSKEDMEEVAFGLELSNVNFIWVARFPKGEERNLEDALPKGFLERIGERGRVLDKFAPQPRILNHPSTGGFISHCGWNSAMESIDFGVPIIAMPIHNDQPINARLIVELGVAVEIVRDDDGKIHREEIAETLKEVITGETGEILRAKVREISKNLKSIRDEEMDAVAEELIQLCRNSNKSK

SEQ ID NO: 324 - protein, 442 aa, Artificial Sequence
  engineered beta-1,2-glycosyltransferase encoded in plasmid pA29713
MATNLRVLMFPWLAYGHISPFLNIAKQLADRGFLIYLCSTRINLESIIKKIPEKYADSIHLIELQLPELPELPPHYHTTNGLPPHLNPTLHKALKMSKPNFSRILQNLKPDLLIYDVLQPWAEHVANEQNIPAGKLLTSCAAVFSYFFHFVKNPGVEFPFPAIHLPEVEKVKIREILAKEPEEEDRFAEGNKQMMLMCTSRTIEAKYIDYLSELSNWKVVPVGPPFQDLITNDADNKELIDWLGTKHENSTVFVSFGSEYFLSKEDMEEIAFGLELSNVNFIWVARFPKGEERNLEDALPKGFLERIGERGRVLDKFAPQPRILNHPSTGGFISHCGWNSAMESIDFGVPIIAMPIHNDQPINARLMVELGVAVEIVRDDDGKIHRGEIAEVLKDVITGETGEILRAKVREISKNLKSIRDEEMDAVAEELIQLCRNSNKSK

SEQ ID NO: 325 - protein, 442 aa, Artificial Sequence
  engineered beta-1,2-glycosyltransferase encoded in plasmid pA29714
MATNLRVLMFPWLAYGHISPFLNIAKQLADRGFLIYLCSTRINLESIIKKIPEKYADSIHLIELQLPELPELPPHYHTTNGLPPHLNPTLKKALKMSKPNFSRILQNLKPDLVIYDVLQPWAEHVANEQNIPAVKLLTSCAAVFSYFFNFRKNPGVEFPFPAIHLPEVEKVKIREILAKEPEEGGRLDEGNKQMMLMCTSRTIEAKYIDYLTELCNWKVVPVGPPFQDLITNDADNKELIDWLGTKHENSTVFVSFGSEYFLSKEDMEEVAFALELSNVNFIWVVRFPKGEERNLEDALPKGFLERIGERGRVLDKFAPQPRILNHPSTGGFISHCGWNSAMESIDFGVPIIAMPIHNDQPINAKLMVELGVAVEIVRDDDGKIHRGEIAETLKSVVTGETGEILRAKVREISKNLKSIRDEEMDAVAEELIQLCRNSNKSK

SEQ ID NO: 326 - protein, 442 aa, Artificial Sequence
  engineered beta-1,2-glycosyltransferase encoded in plasmid pA29715
MATNLRVLMFPWLAYGHISPFLNIAKQLADRGFLIYLCSTRINLESIIKKIPEKYADSIHLIELQLPELPELPPHYHTTNGLPPHLNPTLKKALKMSKPNFSRILQNLKPDLLIYDVLQPWAEHVANEQNIPAVKFLTSCAAVFSYFFHFRKNPGVEFPFPAIHLPEVEKVKIREILEKEPEEGGRLDEGNKQMMLICTSRTIEAKYIDYLTELCNWKVVPVGPPFQDLITNDADNKELIDWLGTKHENSTVFVSFGSEYFLSKEDMEEVAFALELSNVNFIWVVRFPKGEERNLEDALPKGFLERIGERGRVLDKFAPQPRILNHPSTGGFISHCGWNSAMESIDFGVPIIAMPIHNDQPINAKLMVELGVAVEIVRDDDGKIHRGEIAETLKSVVTGETGEILRAKVREISKNLKSIRDEEMDAVAEELIQLCRNSNKSK

SEQ ID NO: 327 - protein, 442 aa, Artificial Sequence
  engineered beta-1,2-glycosyltransferase encoded in plasmid pA29716
MATNLRVLMFPWLAYGHISPFLNIAKQLADRGFLIYLCSTRINLESIIKKIPEKYADSIHLIELQLPELPELPPHYHTTNGLPPHLNPTLQKALKMSKPNFSRILQNLKPDLVIYDVLQPWAEHVANEQNIPAVKLITSCAAVFSYFFNFRKNPGVEFPFPAIHLPEVEKVKIREILAKEPEEGGRLDDGNKQMMLMCTSRTIEAKYIDYLTELCNWKVVPVGPPFQDLITNDADNKELIDWLGTKHENSTVFVSFGSEYFLSKEDMEEVAFALELSNVNFIWVARFPKGEERNLEDALPKGFLERIGERGRVLDKFAPQPRILNHPSTGGFISHCGWNSAMESIDFGVPIIAMPIHNDQPINAKLMVELGVAVEIVRDDDGKIHRGEIAETLKSVVTGETGEILRAKVREISKNLKSIRDEEMDAVAEELIQLCRNSNKSK

SEQ ID NO: 328 - protein, 442 aa, Artificial Sequence
  engineered beta-1,2-glycosyltransferase encoded in plasmid pA29717
MATNLRVLMFPWLAYGHISPFLNIAKQLADRGFLIYLCSTRINLESIIKKIPEKYADSIHLIELQLPELPELPPHYHTTNGLPPHLNPTLKKALKMSKPNFSRILQNLKPDLVIYDVLQPWAEHVANEQNIPAVKLLTSCAAVFSYFFNFRKNPGVEFPFPAIHLPEVEKVKIREILAKEPEEGGRLDEGNKQMMLMCTSRTIEAKYIDYLTELCNWKVVPVGPPFQDLITNDADNKELIDWLGTKHENSTVFVSFGSEYFLSKEDMEEIAFALELSNVNFIWVVRFPKGEERNLEDALPKGFLERIGERGRVLDKFAPQPRILNHPSTGGFISHCGWNSVMESIDFGVPIIAMPIHNDQPINAKLMVELGVAVEIVRDDDGKIHRGEIAETLKSVVTGETGEILRAKVREISKNLKSIRDEEMDAVAEELIQLCRNSNKSK

SEQ ID NO: 329 - protein, 442 aa, Artificial Sequence
  engineered beta-1,2-glycosyltransferase encoded in plasmid pA29718
MATNLRVLMFPWLAYGHISPFLNIAKQLADRGFLIYLCSTRINLESIIKKIPEKYADSIHLIELQLPELPELPPHYHTTNGLPPHLNPTLKKALKMSKPNFSRILQNLKPDLLIYDVLQPWAEHVANEQNIPAVKLLTSCAAVFSYFFHFRKNPGVEFPFPAIHLPEVEKVKIREILAKEPEEGGRLDEGNKQMMLICTSRTIEAKYIDYLTELCNWKVVPVGPPFQDLITNDADNKELIDWLGTKHENSTVFVSFGSEYFLSKEDMEEVAFALELSNVNFIWVVRFPKGEERNLEDALPKGFLERIGERGRVLDKFAPQPRILNHPSTGGFVSHCGWNSVMESIDFGVPIIAMPIHNDQPINAKLIVELGVAVEIVRDDDGKIHRGEIAETLKSVVTGETGEILRAKVREISKNLKSIRDEEMDAVAEELIQLCRNSNKSK

SEQ ID NO: 330 - protein, 442 aa, Artificial Sequence
  engineered beta-1,2-glycosyltransferase encoded in plasmid pA29719
MATNLRVLMFPWLAYGHISPFLNIAKQLADRGFLIYLCSTRINLESIIKKIPEKYADSIHLIELQLPELPELPPHYHTTNGLPPHLNPTLQKALKMSKPNFSRILQNLKPDLVIYDVLQPWAEHVANEQNIPAVKFITSCAAVFSYFFNFRKNPGVEFPFPAIHLPEVEKVKIREILAKEPEEGGRLDEGNKQMMLMCTSRTIEAKYIDYLTELCNWKVVPVGPPFQDLITNDADNKELIDWLGTKHENSTVFVSFGSEYFLSKEDMEEIAFALELSNVNFIWVVRFPKGEERNLEDALPKGFLERIGERGRVLDKFAPQPRILNHPSTGGFISHCGWNSVMESIDFGVPIIAMPIHNDQPINAKLMVELGVAVEIVRDDDGKIHRGEIAETLKSVVTGETGEILRAKVREISKNLKSIRDEEMDAVAEELIQLCRNSNKSK

SEQ ID NO: 331 - protein, 442 aa, Artificial Sequence
  engineered beta-1,2-glycosyltransferase encoded in plasmid pA29720
MATTLRVLMFPWLAYGHISPFLNVAKKLADRGFLIYLCSTPINLKSIKKKIPEKYSDSIQLVELHLPELPELPPHYHTTNGLPPHLNPTLQKALKMSKPNFSKILQNLKPDLVIYDVLQQWAEHVANEQNIPAVKLLTSCAAVFSYFFNFVKKPGVEFPFPAIHLPKVEQVKIREILAKEPEEKGRFAEGNMQIMLMCTSRTIEAKYIDYLSELSNWKVVPVGPPFQDLITNDADDVELIDWLGTKDENSTVFVSFGSEYFLSKEDMEEIAFGLELSNVNFIWVARFPKGEEQNLEDALPKGFLERIGERGRVLDKFAPQPRILNHPSTGGFISHCGWNSAMESIDFGVPIIAMPIHNDQPINARLMVELGVAVEIVRDDDGKIHRGEIAETLKDVITGKTGENLRAKVRDISKNLKSIRGEEMDAAAEELIQLCKNSNKSK

SEQ ID NO: 332 - protein, 442 aa, Artificial Sequence
  engineered beta-1,2-glycosyltransferase encoded in plasmid pA29721
MATTLKVLMFPWLAYGHISPFLNLAKKLADRGFLIYLCSTPINLKSIKKKIPEKYSDSIQLVELHLPELPELPPHYHTTNGLPPHLNPTLKKALKMSKPNFSKILKNLKPDLVIYDVLQQWAEHVANEQNIPAVKLLTSCAAVFSYFFHFVKKPGVEFPFPAIHLPKVEQVKIREILAKEPEDKGRFAEGNMQIMLMCTSRAIEAKYIDYLSELSNWKVVPVGPPFQDLITNDDDDVELIDWLGKKDENSTVFVSFGSEYFLSKEDMEEIAFGLELSNVNFIWVARFPKGEEQNLEDALPKGFLERIGERGRVLDKFAPQPRILNHPSTGGFVSHCGWNSAMESIDFGVPIIAMPIHNDQPINARLIVELGVAVEIVRDDDGKIHREEIAETLKDVITGKTGENLRAKVRDISKNLKSIRGEEMDAAAEELIQLCKNSNKSK

SEQ ID NO: 333 - protein, 442 aa, Artificial Sequence
  engineered beta-1,2-glycosyltransferase encoded in plasmid pA29722
MATTLRVLMFPWLAYGHISPFLNLAKKLADRGFLIYLCSTPINLKSIKKKIPEKYSDSIQLVELHLPELPELPPHYHTTNGLPPHLNPTLQKALKMSKPNFSKILKNLKPDLVIYDVLQQWAEHVANEQNIPAVKLLTSCAAVFSYFFNFVKKPGVEFPFPAIHLPKVEQVKIREILAKEPEDKGRFAEGNMQIMLMCTSREIEAKYIDYLTELSNWKVVPVGPPFQDLITNDDDDVELIDWLGKKDENSTVFVSFGSEYFLSKEDMEEIAFGLELSNVNFIWVARFPKGEEQNLEDALPKGFLERIGERGRVLDKFAPQPRILNHPSTGGFISHCGWNSAMESIDFGVPIIAMPIHNDQPINARLMVELGVAVEIVRDDDGKIHREEIAEVLKSVITGKIGENLRAKVRDISKNLKSIRGEEMDAAAEELIQLCKNSNKSK

SEQ ID NO: 334 - protein, 442 aa, Artificial Sequence
  engineered beta-1,2-glycosyltransferase encoded in plasmid pA29723
MATTLRVLMFPWLAYGHISPYLNVAKKLADRGFLIYLCSTPINLKSIKKKIPEKYSDSIQLVELHLPELPELPPHYHTTNGLPPHLNPTLQKALKMSKPNFSKILQNLKPDLVIYDVLQQWAEHVANEQNIPAVKLLTSCAAVFSYFFNFVKKPGVEFPFPAIHLPKVEQVKIREILAKEPEEKGRFAEGNMQIMLMCTSRIIEAKYIDYLSELSNWKVVPVGPPFQDLITNDADDVELIDWLGTKDENSTVFVSFGSEYFLSKEDMEEVAFGLELSNVNFIWVARFPKGEEQNLEDALPKGFLERIGERGRVLDKFAPQPRILNHPSTGGFISHCGWNSAMESIDFGVPIIAMPIHNDQPINARLMVELGVAVEIVRDDDGKIHRGEIAETLKGVITGKTGENLRAKVRDISKNLKSIRGEEMDAAAEELIQLCKNSNKSK

SEQ ID NO: 335 - protein, 442 aa, Artificial Sequence
  engineered beta-1,2-glycosyltransferase encoded in plasmid pA29724
MASTLRVLMFPWLAYGHISPFLNVAKKLADRGFLIYLCSTPINLKSIKKKIPEKYSDSIQLVELHLPELPELPPHYHTTNGLPPHLNPTLKKALKMSKPNFSKILKNLKPDLVIYDVLQQWAEHVANEQNIPAVKLLTSCAAVFSYFFNFVKKPGVEFPFPAIHLPKVEQVKIREILAKEPEDKGRFAEGNMQIMLMCTSRTIEAKYIDYLSELSNWKVVPVGPPFQDLITNDDDDMELIDWLGTKDENSTVFVSFGSEYFLSKEDMEEIAFGLELSNVNFIWVARFPKGEEQNLEDALPKGFLERIGERGRVLDKFAPQPRILNHPSTGGFISHCGWNSAMESIDFGVPIIAMPIHNDQPINARLIVELGVAVEIVRDDDGKIHRGEIAETLKDVITGKTGENLRAKVRDISKNLKSIRDEEMDAAAEELIQLCKNSNKSK

SEQ ID NO: 336 - protein, 442 aa, Artificial Sequence
  engineered beta-1,2-glycosyltransferase encoded in plasmid pA29725
MATTLRVLMFPWLAYGHISPFLNLAKKLADRGFLIYLCSTPINLKSIKKKIPEKYSDSIQLVELHLPELPELPPHYHTTNGLPPHLNPTLKKALKMSKPNFSKILQNLKPDLVIYDVLQQWAEHVANEQNIPAVKLLTSCAAVFSYFFNFVKKPGVEFPFPAIHLPKVELVKIREILAKEPEEKGRFAEGNSQIMLMCTSREIEAKYIDYLSELSNWKVVPVGPPFQDLITNDDDDVELIDWLGKKDENSTVFVSFGSEYFLSKEDMEEIAFGLELSNVNFIWVARFPKGEEQNLEDALPKGFLERIGERGRVLDKFAPQPRILNHPSTGGFISHCGWNSAMESIDFGVPIIAMPIHNDQPINARLMVELGVAVEIVRDDDGKIHREEIAEVLKDVITGKTGENLRAKVRDISKNLKSIRGEEMDAAAEELIQLCKNSNKSK

SEQ ID NO: 337 - protein, 442 aa, Artificial Sequence
  engineered beta-1,2-glycosyltransferase encoded in plasmid pA29726
MATTLRVLMFPWLAYGHISPFLNVAKKLADRGFLIYLCSTPINLKSIKKKIPEKYSDSIQLVELHLPELPELPPHYHTTNGLPPHLNPTLQKALKMSKPNFSKILQNLKPDLLIYDVLQQWAEHVANEQNIPAVKLLTSCAAVFSYFFNFVKKPGVEFPFPAIHLPKVEQVKIREILAKEPEEKGRFAEGNMQIMLMCTSRTIEAKYIDYLTELSNWKVVPVGPPFQDLITNDADDVELIDWLGTKDENSTVFVSFGSEYFLSKEDMEEIAFGLELSNVNFIWVARFPKGEEQNLEDALPKGFLERIGERGRVLDKFAPQPRILNHPSTGGFISHCGWNSAMESIDFGVPIIAMPIHNDQPINARLIVELGVAVEIVRDDDGKIHRGEIAETLKEVITGKTGENLRAKVRDISKNLKSIRGEEMDAAAEELIQLCKNSNKSK

SEQ ID NO: 338 - protein, 442 aa, Artificial Sequence
  engineered beta-1,2-glycosyltransferase encoded in plasmid pA29727
MATTLRVLMFPWLAYGHISPFLNLAKKLADRGFLIYLCSTPINLKSIKKKIPEKYSDSIQLVELHLPELPELPPHYHTTNGLPPHLNPTLQKALKMSKPNFSKILQNLKPDLVIYDVLQQWAEHVANEQNIPAVKLLTSCAAVFSYFFHFVKKPGVEFPFPAIHLPKVEQVKIREILAKEPEDKGRFAEGNMQIMLMCTSRAIEAKYIDYLSELSNWKVVPVGPPFQDLITNDDDDMELIDWLGKKDENSTVFVSFGSEYFLSKEDMEEIAFGLELSNVNFIWVARFPKGEEQNLEDALPKGFLERIGERGRVLDKFAPQPRILNHPSTGGFISHCGWNSAMESIDFGVPIIAMPIHNDQPINARLMVELGVAVEIVRDDDGKIHREEIAEVLKDVITGKTGENLRAKVRDISENLKSIRGEEMDAAAEELIQLCKNSNKSK

SEQ ID NO: 339 - protein, 442 aa, Artificial Sequence
  engineered beta-1,2-glycosyltransferase encoded in plasmid pA29728
MATTLRVLMFPWLAYGHISPFLNLAKKLADRGFLIYLCSTPINLKSIKKKIPEKYSDSIQLVELHLPELPELPPHYHTTNGLPPHLNPTLQKALKMSKPNFSKILKNLKPDLVIYDVLQQWAEHVANEQNIPAVKLLTSCAAVFSYFFNFVRKPGVEFPFPAIHLPKVEQVKIREILAKEPEEKGRFAEGNMQIMLMCTSRIIEAKYIDYLSELSNWKVVPVGPPFQDLITNDADDVELIDWLGKKDENSTVFVSFGSEYFLSKEDMEEIAFGLELSNVNFIWVARFPKGEEQNLEDALPKGFLERIGERGRVLDKFAPQPRILNHPSTGGFISHCGWNSAMESIDFGVPIIAMPIHNDQPINARLMVELGVAVEIVRDDDGKIHREEIAETLKGVITGKIGENLRAKVRDISKNLKSIRGEEMDAAAEELIQLCKNSNKSK

SEQ ID NO: 340 - protein, 442 aa, Artificial Sequence
  engineered beta-1,2-glycosyltransferase encoded in plasmid pA29729
MATTLRVLMFPWLAYGHISPFLNVAKKLADRGFLIYLCSTPINLNSIKKKIPEKYSDSIQLVELHLPELPELPPHYHTTNGLPPHLNPTLKKALKMSKPNFSKILQNLKPDLVIYDVLQQWAEHVANEQNIPAVKLLTSCAAVFSYFFNFVKKPGVEFPFPAIHLPKVEQVKIREILAKEPEEKGRFAEGNMQIMLMCTSRTIEAKYIDYLTELSNWKVVPVGPPFQDLITNDDDDMELIDWLGTKDENSTVFVSFGSEYFLSKEDMEEIAFGLELSNVNFIWVARFPKGEEQNLEDALPKGFLERIGERGRVLDKFAPQPRILNHPSTGGFVSHCGWNSAMESIDFGVPIIAMPIHNDQPINARLMVELGVAVEIVRDDDGKIHRGEIAETLKDVITGKTGENLRAKVRDISKNLKSIRGEEMDAAAEELIQLCKNSNKSK

SEQ ID NO: 341 - protein, 442 aa, Artificial Sequence
  engineered beta-1,2-glycosyltransferase encoded in plasmid pA29730
MATTLRVLMFPWLAYGHISPFLNVAKKLADRGFLIYLCSTPINLKSIKKKIPEKYSDSIQLVELHLPELPELPPHYHTTNGLPPHLNPTLQKALKMSKPNFSKILKNLKPDLVIYDVLQQWAEHVANSHNIPAVKLLTSCAAVFSYFFNFVKKPGVEFPFPAIHLPKVEQVKIREILAKEPEDKGRFAEGNMQIMLMCTSREIEAKYIDYLSELSNWKVVPVGPPFQDLITNDDDDVELIDWLGKKDENSTVFVSFGSEYFLSKEDMEEIAFGLELSNVNFIWVARFPKGEEQNLEDALPKGFLERIGERGRVLDKFAPQPRILNHPSTGGFISHCGWNSAMESIDFGVPIIAMPIHNDQPINARLMVELGVAVEIVRDDDGKIHREEIAEVLKDVITGKTGENLRAKVRDISKNLKSIRGEEMDAAAEELIQLCKNSNKSK

SEQ ID NO: 342 - protein, 442 aa, Artificial Sequence
  engineered beta-1,2-glycosyltransferase encoded in plasmid pA29731
MASTLRVLMFPWLAYGHISPFLNLAKKLADRGFLIYLCSTPINLKSIKKKIPEKYSDSIQLVELHLPELPELPPHYHTTNGLPPHLNPTLKKALKMSKPNFSKILKNLKPDLVIYDVLQQWAEHVANEQNIPAVKLLTSCAAVFSYFFNFVKKPGVEFPFPAIHLPKVEQVKIREILAKEPEDKGRFAEGNMQIMLMCTSRAIEAKYIDYLTELSNWKVVPVGPPFQDLITNDADDVELIDWLGTKDENSTVFVSFGSEYFLSKEDMEEIAFGLELSNVNFIWVARFPKGEEQNLEDALPKGFLERIGERGRVLDKFAPQPRILNHPSTGGFISHCGWNSAMESIDFGVPIIAMPIHNDQPINARLVVELGVAVEIVRDDDGKIHRGEIAETLKDVITGKTGENLRAKVRDISKNLKSIRGEEMDAAAEELIQLCKNSNKSK

SEQ ID NO: 343 - protein, 442 aa, Artificial Sequence
  engineered beta-1,2-glycosyltransferase encoded in plasmid pA29732
MATTLKVLMFPWLAYGHISPFLNLAKKLADRGFLIYLCSTPINLKSIKKKIPEKYSDSIQLVELHLPELPELPPHYHTTNGLPPHLNPTLQKALKMSKPNFSKILQNLKPDLVIYDVLQQWAEHVANEQNIPAVKLLTSCAAVFSYFFNFVKKPGVEFPFPAIHLPKVEQVKIREILAKEPEEKGRFAEGNMQIMLMCTSRTIEAKYIDYLSELSNWKVVPVGPPFQDLITNDADDVELIDWLGTKDENSTVFVSFGSEYFLSKEDMEEIAFGLELSNVNFIWVARFPKGEEQNLEDALPKGFLERIGERGRVLDKFAPQPRILNHPSTGGFISHCGWNSAMESIDFGVPIIAMPIHNDQPINARLIVELGVAVEIVRDDDGKIHRGEIAETLKGVITGKTGENLRKKVRDISKNLKSIRGEEMDAAAEELIQLCKNSNKSK

SEQ ID NO: 344 - protein, 442 aa, Artificial Sequence
  engineered beta-1,2-glycosyltransferase encoded in plasmid pA29733
MATTLRVLMFPWLAYGHISPFLNVAKKLADRGFLIYLCSTPINLKSIKKKIPEKYSDSIQLVELHLPELPELPPHYHTTNGLPPHLNPTLKKALKMSKPNFSKILQNLKPDLVIYDVLQQWAEHVANEQNIPAVKLLTSCAAVFSYFFNFVKKPGVEFPFPAIHLPKVEQVKIREILAKEPEDKGRFAEGNTQIMLMCTSRTIEAKYIDYLSELSNWKVVPVGPPFQDLITNDDDDVELIDWLGKKDENSTVFVSFGSEYFLSKEDMEEVAFGLELSNVNFIWVARFPKGEEQNLEDALPKGFLERIGERGRVLDKFAPQPRILNHPSTGGFISHCGWNSAMESIDFGVPIIAMPIHNDQPINARLMVELGVAVEIVRDDDGKIHREEIAETLKSVITGKTGENLRAKVRDISKNLKSIRGEEMDAAAEELIQLCKNSNKSK

SEQ ID NO: 345 - protein, 442 aa, Artificial Sequence
  engineered beta-1,2-glycosyltransferase encoded in plasmid pA29734
MATTLKVLMFPWLAYGHISPFLNLAKKLADRGFLIYLCSTPINLKSIKKKIPEKYSDSIQLVELHLPELPELPPHYHTTNGLPPHLNPTLQKALKMSKPNFSKILKNLKPDLVIYDVLQQWAEHVANEQNIPAVKLLTSCAAVFSYFFHFVKKPGVEFPFPAIHLPKVEQVKIREILAKEPEDKGRFAEGNMQIMLMCTSRIIEAKYIDYLSELSNWKVVPVGPPFQDLITNDDDDVELIDWLGKKDENSTVFVSFGSEYFLSKEDMEEIAFGLELSNVNFIWVARFPKGEEQNLEDALPKGFLERIGERGRVLDKFAPQPRILNHPSTGGFISHCGWNSAMESIDFGVPIIAMPIHNDQPINARLMVELGVAVEIVRDDDGKIHREEIAETLKDVITGKTGENLRAKVRDISKNLKSIREEEMDAAAEELIQLCKNSNKSK

SEQ ID NO: 346 - protein, 442 aa, Artificial Sequence
  engineered beta-1,2-glycosyltransferase encoded in plasmid pA29735
MATTLRVLMFPWLAYGHISPFLNVAKKLADRGFLIYLCSTPINLKSIKKKIPEKYSDSIQLVELHLPELPELPPHYHTTNGLPPHLNPTLKKALKMSKPNFSKILQNLKPDLVIYDVLQQWAEHVANEQNIPAVKLLTSCAAVFSYFFNFVKKPGVEFPFPAIHLPKVEQVKIREILAKEPEEKGRFAEGNMQIMLMCTSRTIEAKYIDYLTELSNWKVVPVGPPFQDLITNDADDVELIDWLGTKDENSTVFVSFGSEYFLSKEDMEEIAFGLELSNVNFIWVARFPKGEEQNLEDALPKGFLERIGERGRVLDKFAPQPRILNHPSTGGFISHCGWNSAMESIDFGVPIIAMPIHNDQPINARLIVELGVAVEIVRDDDGKIHRGEIAETLKDVITGKIGENLRAKVRDISKNLKSIRGEEMDAVAEELIQLCKNSNKSK

SEQ ID NO: 347 - protein, 442 aa, Artificial Sequence
  engineered beta-1,2-glycosyltransferase encoded in plasmid pA29736
MATTLRVLMFPWLAYGHISPFLNLAKKLADRGFLIYLCSTPINLKSIKKKIPEKYSDSIQLVELHLPELPELPPHYHTTNGLPPHLNPTLQKALKMSKPNFSKILKNLKPDLVIYDVLQQWAEHVANEQNIPAVKLLTSCAAVFSYFFNFVKKPGVEFPFPAIHLPKVEQVKIREILAKEPEDKGRFAEGNSQIMLMCTSREIEAKYIDYLSELSNWKVVPVGPPFQDLITNDDDDVELIDWLGKKDENSTVFVSFGSEYFLSKEDMEEIAFGLELSNVNFIWVARFPKGEEQNLEDALPKGFLERIGERGRVLDKFAPQPRILNHPSTGGFVSHCGWNSAMESIDFGVPIIAMPIHNDQPINARLVVELGVAVEIVRDDDGKIHREEIAEVLKDVITGKTGENLRAKVRDISKNLKSIRGEEMDAAAEELIQLCKNSNKSK

SEQ ID NO: 348 - protein, 442 aa, Artificial Sequence
  engineered beta-1,2-glycosyltransferase encoded in plasmid pA29737
MATNLRVLMFPWLAYGHISPFLNIAKQLADRGFLIYLCSTRINLESIIKKIPEKYADSIHLIELQLPELPELPPHYHTTNGLPPHLNPTLKKALKMSKPNFSRILQNLKPDLLIYDVLQPWAEHVANEQNIPAVKLITSCAAVFSYFFHFVKNPGVEFPFPAIHLPEVEKVKIREILAKEPEEKDRFAEGNKQMMLMCTSRTIEAKYIDYLSELSNWKVVPVGPPFQDLITNDADNKELIDWLGTKHENSTVFVSFGSEYFLSKEDMEEIAFGLELSNVNFIWVVRFPKGEERNLEDALPKGFLERIGERGRVLDKFAPQPRILNHPSTGGFISHCGWNSAMESIDFGVPIIAMPIHNDQPINARLIVELGVAVEIVRDDDGKIHRGEIAETLKDVITGETGEILRAKVREISKNLKSIRDEEMDAVAEELIQLCRNSNKSK

SEQ ID NO: 349 - protein, 442 aa, Artificial Sequence
  engineered beta-1,2-glycosyltransferase encoded in plasmid pA29738
MATNLRVLMFPWLAYGHISPFLNIAKQLADRGFLIYLCSTRINLESIIKKIPEKYADSIHLIELQLPELPELPPHYHTTNGLPPHLNPTLKKALKMSKPNFSRILQNLKPDLLIYDVLQPWAEHVANEQNIPAVKLLTSCAAVFSYFFHFVKNPGVEFPFPAIHLPEVEKVKIREILAKEPEEKDRFAEGNKQMMLMCTSRTIEAKYIDYLTELSNWKVVPVGPPFQDLITNDADNKELIDWLGTKHENSTVFVSFGSEYFLSKEDMEEIAFGLELSNVNFIWVVRFPKGEERNLEDALPKGFLERIGERGRVLDKFAPQPRILNHPSTGGFVSHCGWNSVMESIDFGVPIIAMPIHNDQPINARLIVELGVAVEIVRDDDGKIHREEIAETLKGVITGETGEILRAKVREISKNLKSIRDEEMDAVAEELIQLCRNSNKSK

SEQ ID NO: 350 - protein, 442 aa, Artificial Sequence
  engineered beta-1,2-glycosyltransferase encoded in plasmid pA29740
MATNLRVLMFPWLAYGHISPFLNIAKQLADRGFLIYLCSTRINLESIIKKIPEKYADSIHLIELQLPELPELPPHYHTTNGLPPHLNPTLKKALKMSKPNFSRILQNLKPDLLIYDVLQPWAEHVANEQNIPAVKLITSCAAVFSYFFHFVKNPGVEFPFPAIHLPEVEKVKIREILAKEPEEKDRFAEGNKQMMLMCTSRTIEAKYIDYLTELSNWKVVPVGPPFQDLITNDADNKELIDWLGTKHENSTVFVSFGSEYFLSKEDMEEIAFGLELSNVNFIWVVRFPKGEERNLEDALPKGFLERIGERGRVLDKFAPQPRILNHPSTGGFVSHCGWNSVMESIDFGVPIIAMPIHNDQPINARLIVELGVAVEIVRDDDGKIHRGEIAETLKGVITGETGEILRAKVREISKNLKSIRDEEMDAVAEELIQLCRNSNKSK

SEQ ID NO: 351 - protein, 442 aa, Artificial Sequence
  engineered beta-1,2-glycosyltransferase encoded in plasmid pA29741
MATNLRVLMFPWLAYGHISPFLNIAKQLADRGFLIYLCSTRINLESIIKKIPEKYADSIHLIELQLPELPELPPHYHTTNGLPPHLNPTLQKALKMSKPNFSRILQNLKPDLVIYDVLQPWAEHVANEQNIPAVKLLTSCAAVFSYFFNFVKNPGVEFPFPAIHLPEVEKVKIREILAKEPEDKDRFAEGNKQMMLMCTSRTIEAKYIDYLSELSNWKVVPVGPPFQDLITNDADNKELIDWLGTKHENSTVFVSFGSEYFLSKEDMEEIAFGLELSNVNFIWVVRFPKGEERNLEDALPKGFLERIGERGRVLDKFAPQPRILNHPSTGGFISHCGWNSVMESIDFGVPIIAMPIHNDQPINARLMVELGVAVEIVRDDDGKIHREEIAEVLKDVITGETGEILRAKVREISKNLKSIRDEEMDAVAEELIQLCRNSNKSK

SEQ ID NO: 352 - protein, 442 aa, Artificial Sequence
  engineered beta-1,2-glycosyltransferase encoded in plasmid pA29742
MATNLRVLMFPWLAYGHISPFLNIAKQLADRGFLIYLCSTRINLESIIKKIPEKYADSIHLIELQLPELPELPPHYHTTNGLPPHLNPTLHKALKMSKPNFSRILQNLKPDLLIYDVLQPWAEHVANEQNIPAGKLLTSCAAVFSYFFHFVKNPGVEFPFPAIHLPEVEKVKIREILAKEPEDKDRFAEGNKQMMLMCTSRTIEAKYIDYLTELSNWKVVPVGPPFQDLITNDADNKELIDWLGTKHENSTVFVSFGSEYFLSKEDMEEIAFGLELSNVNFIWVARFPKGEERNLEDALPKGFLERIGERGRVLDKFAPQPRILNHPSTGGFISHCGWNSAMESIDFGVPIIAMPIHNDQPINARLIVELGVAVEIVRDDDGKIHREEIAETLKGVITGETGEILRAKVREISKNLKSIRDEEMDAVAEELIQLCRNSNKSK

SEQ ID NO: 353 - protein, 442 aa, Artificial Sequence
  engineered beta-1,2-glycosyltransferase encoded in plasmid pA29743
MATNLRVLMFPWLAYGHISPFLNIAKQLADRGFLIYLCSTRINLESIIKKIPEKYADSIHLIELQLPELPELPPHYHTTNGLPPHLNPTLHKALKMSKPNFSRILQNLKPDLLIYDVLQPWAEHVANEQNIPAGKLLTSCAAVFSYFFNFVKNPGVEFPFPAIHLPEVEKVKIREILAKEPEEKDRLAEGNKQMMLMCTSRTIEAKYIDYLSELSNWKVVPVGPPFQDLITNDADNKELIDWLGTKHENSTVFVSFGSEYFLSKEDMEEVAFGLELSNVNFIWVARFPKGEERNLEDALPKGFLERIGERGRVLDKFAPQPRILNHPSTGGFISHCGWNSAMESIDFGVPIIAMPIHNDQPINARLMVELGVAVEIVRDDDGKIHRGEIAEVLKDVITGETGEILRAKVREISKNLKSIRDEEMDAVAEELIQLCRNSNKSK

SEQ ID NO: 354 - protein, 442 aa, Artificial Sequence
  engineered beta-1,2-glycosyltransferase encoded in plasmid pA29744
MATNLRVLMFPWLAYGHISPFLNIAKQLADRGFLIYLCSTRINLESIIKKIPEKYADSIHLIELQLPELPELPPHYHTTNGLPPHLNPTLQKALKMSKPNFSRILQNLKPDLLIYDVLQPWAEHVANEQNIPAVKFITSCAAVFSYFFHFRKNPGVEFPFPAIHLPEVEKVKIREILAKEPEEGGRLDEGNKQMMLICTSRTIEAKYIDYLTELCNWKVVPVGPPFQDLITNDADNKELIDWLGTKHENSTVFVSFGSEYFLSKEDMEEVAFALELSNVNFIWVVRFPKGEERNLEDALPKGFLERIGERGRVLDKFAPQPRILNHPSTGGFISHCGWNSAMESIDFGVPIIAMPIHNDQPINAKLMVELGVAVEIVRDDDGKIHRGEIAETLKSVVTGETGEILRAKVREISKNLKSIRDEEMDAVAEELIQLCRNSNKSK

SEQ ID NO: 355 - protein, 442 aa, Artificial Sequence
  engineered beta-1,2-glycosyltransferase encoded in plasmid pA29745
MATNLRVLMFPWLAYGHISPFLNIAKQLADRGFLIYLCSTRINLESIIKKIPEKYADSIHLIELQLPELPELPPHYHTTNGLPPHLNPTLKKALKMSKPNFSRILQNLKPDLVIYDVLQPWAEHVANEQNIPAVKLLTSCAAVFSYFFNFRKNPGVEFPFPAIHLPEVEKVKIREILEKEPEEGGRLDDGNKQMMLMCTSRTIEAKYIDYLTELCNWKVVPVGPPFQDLITNDADNKELIDWLGTKHENSTVFVSFGSEYFLSKEDMEEVAFALELSNVNFIWVARFPKGEERNLEDALPKGFLERIGERGRVLDKFAPQPRILNHPSTGGFISHCGWNSAMESIDFGVPIIAMPIHNDQPINAKLMVELGVAVEIVRDDDGKIHRGEIAETLKSVVTGETGEILRAKVREISKNLKSIRDEEMDAVAEELIQLCRNSNKSK

SEQ ID NO: 356 - protein, 442 aa, Artificial Sequence
  engineered beta-1,2-glycosyltransferase encoded in plasmid pA29746
MATNLRVLMFPWLAYGHISPFLNIAKQLADRGFLIYLCSTRINLESIIKKIPEKYADSIHLIELQLPELPELPPHYHTTNGLPPHLNPTLKKALKMSKPNFSRILQNLKPDLVIYDVLQPWAEHVANEQNIPAVKLLTSCAAVFSYFFNFRKNPGVEFPFPAIHLPEVEKVKIREILAKEPEEGGRLDEGNKQMMLMCTSRTIEAKYIDYLTELCNWKVVPVGPPFQDLITNDADNKELIDWLGTKHENSTVFVSFGSEYFLSKEDMEEIAFALELSNVNFIWVVRFPKGEERNLEDALPKGFLERIGERGRVLDKFAPQPRILNHPSTGGFVSHCGWNSVMESIDFGVPIIAMPIHNDQPINAKLMVELGVAVEIVRDDDGKIHRGEIAETLKSVVTGETGEILRAKVREISKNLKSIRDEEMDAVAEELIQLCRNSNKSK

SEQ ID NO: 357 - protein, 442 aa, Artificial Sequence
  engineered beta-1,2-glycosyltransferase encoded in plasmid pA29747
MATNLRVLMFPWLAYGHISPFLNIAKQLADRGFLIYLCSTRINLESIIKKIPEKYADSIHLIELQLPELPELPPHYHTTNGLPPHLNPTLKKALKMSKPNFSRILQNLKPDLLIYDVLQPWAEHVANEQNIPAVKLLTSCAAVFSYFFHFRKNPGVEFPFPAIHLPEVEKVKIREILAKEPEEGGRLDEGNKQMMLICTSRTIEAKYIDYLTELCNWKVVPVGPPFQDLITNDADNKELIDWLGTKHENSTVFVSFGSEYFLSKEDMEEVAFALELSNVNFIWVVRFPKGEERNLEDALPKGFLERIGERGRVLDKFAPQPRILNHPSTGGFISHCGWNSVMESIDFGVPIIAMPIHNDQPINAKLIVELGVAVEIVRDDDGKIHRGEIAETLKSVVTGETGEILRAKVREISKNLKSIRDEEMDAVAEELIQLCRNSNKSK

SEQ ID NO: 358 - protein, 442 aa, Artificial Sequence
  engineered beta-1,2-glycosyltransferase encoded in plasmid pA29748
MATNLRVLMFPWLAYGHISPFLNIAKQLADRGFLIYLCSTRINLESIIKKIPEKYADSIHLIELQLPELPELPPHYHTTNGLPPHLNPTLQKALKMSKPNFSRILQNLKPDLVIYDVLQPWAEHVANEQNIPAVKFITSCAAVFSYFFNFRKNPGVEFPFPAIHLPEVEKVKIREILAKEPEEGGRLDEGNKQMMLMCTSRTIEAKYIDYLTELCNWKVVPVGPPFQDLITNDADNKELIDWLGTKHENSTVFVSFGSEYFLSKEDMEEIAFALELSNVNFIWVVRFPKGEERNLEDALPKGFLERIGERGRVLDKFAPQPRILNHPSTGGFVSHCGWNSVMESIDFGVPIIAMPIHNDQPINAKLMVELGVAVEIVRDDDGKIHRGEIAETLKSVVTGETGEILRAKVREISKNLKSIRDEEMDAVAEELIQLCRNSNKSK

SEQ ID NO: 359 - protein, 442 aa, Artificial Sequence
  engineered beta-1,2-glycosyltransferase encoded in plasmid pA29749
MATTLRVLMFPWLAYGHISPFLNLAKKLADRGFLIYLCSTPINLKSIKKKIPEKYSDSIQLVELHLPELPELPPHYHTTNGLPPHLNPTLQKALKMSKPNFSKILQNLKPDLVIYDVLQQWAEHVANEQNIPAVKLLTSCAAVFSYFFNFVKKPGVEFPFPAIHLPKVEQVKIREILAKEPEEKGRFAEGNMQIMLMCTSRTIEAKYIDYLSELSNWKVVPVGPPFQDLITNDADDVELIDWLGTKDENSTVFVSFGSEYFLSKEDMEEIAFGLELSNVNFIWVARFPKGEEQNLEDALPKGFLERIGERGRVLDKFAPQPRILNHPSTGGFISHCGWNSAMESIDFGVPIIAMPIHNDQPINARLMVELGVAVEIVRDDDGKIHRGEIAETLKDVITGKTGENLRAKVRDISKNLKSIRGEEMDAAAEELIQLCKNSNKSK

SEQ ID NO: 360 - protein, 442 aa, Artificial Sequence
  engineered beta-1,2-glycosyltransferase encoded in plasmid pA29750
MATTLRVLMFPWLAYGHISPFLNVAKKLADRGFLIYLCSTPINLKSIKKKIPEKYSDSIQLVELHLPELPELPPHYHTTNGLPPHLNPTLKKALKMSKPNFSKILQNLKPDLVIYDVLQQWAEHVANEQNIPAVKLLTSCAAVFSYFFHFVKKPGVEFPFPAIHLPKVEQVKIREILAKEPEDKGRFAEGNMQIMLMCTSRTIEAKYIDYLTELSNWKVVPVGPPFQDLITNDDDDMELIDWLGKKDENSTVFVSFGSEYFLSKEDMEEIAFGLELSNVNFIWVARFPKGEEQNLEDALPKGFLERIGERGRVLDKFAPQPRILNHPSTGGFISHCGWNSAMESIDFGVPIIAMPIHNDQPINARLMVELGVAVEIVRDDDGKIHREEIAETLKDVITGKTGENLRAKVRDISKNLKSIRGEEMDAAAEELIQLCKNSNKSK

SEQ ID NO: 361 - protein, 442 aa, Artificial Sequence
  engineered beta-1,2-glycosyltransferase encoded in plasmid pA29751
MATTLRVLMFPWLAYGHISPFLNVAKKLADRGFLIYLCSTPINLKSIKKKIPEKYSDSIQLVELHLPELPELPPHYHTTNGLPPHLNPTLQKALKMSKPNFSKILQNLKPDLVIYDVLQQWAEHVANEQNIPAVKLLTSCAAVFSYFFNFVKKPGVEFPFPAIHLPKVEQVKIREILAKEPEEKGRFAEGNMQIMLMCTSRAIEAKYIDYLSELSNWKVVPVGPPFQDLITNDADDVELIDWLGTKDENSTVFVSFGSEYFLSKEDMEEIAFGLELSNVNFIWVARFPKGEEQNLEDALPKGFLERIGERGRVLDKFAPQPRILNHPSTGGFISHCGWNSAMESIDFGVPIIAMPIHNDQPINARLIVELGVAVEIVRDDDGKIHRGEIAETLKGVITGETGENLRAKVRDISKNLKSIRDEEMDAAAEELIQLCKNSNKSK

SEQ ID NO: 362 - protein, 442 aa, Artificial Sequence
  engineered beta-1,2-glycosyltransferase encoded in plasmid pA29752
MATTLKVLMFPWLAYGHISPFLNLAKKLADRGFLIYLCSTPINLKSIKKKIPEKYSDSIQLVELHLPELPELPPHYHTTNGLPPHLNPTLQKALKMSKPNFSKILQNLKPDLVIYDVLQQWAEHVANEQNIPAVKLLTSCAAVFSYFFNFVKKPGVEFPFPAIHLPKVEQVKIREILAKEPEDKGRFAEGNMQIMLMCTSRIIEAKYIDYLSELSNWKVVPVGPPFQDLITNDDDDVELIDWLGKKDENSTVFVSFGSEYFLSKEDMEEIAFGLELSNVNFIWVARFPKGEEQNLEDALPKGFLERIGERGRVLDKFAPQPRILNHPSTGGFISHCGWNSAMESIDFGVPIIAMPIHNDQPINARLMVELGVAVEIVRDDDGKIHREEIAEVLKDVITGKIGENLRAKVRDISKNLKSIRGEEMDAAAEELIQLCKNSNKSK

SEQ ID NO: 363 - protein, 442 aa, Artificial Sequence
  engineered beta-1,2-glycosyltransferase encoded in plasmid pA29753
MATTLRVLMFPWLAYGHISPFLNVAKKLADRGFLIYLCSTPINLKSIKKKIPEKYSDSIQLVELHLPELPELPPHYHTTNGLPPHLNPTLKKALKMSKPNFSKILQNLKPDLVIYDVLQQWAEHVANEQNIPAVKLLTSCAAVFSYFFNFVKKPGVEFPFPAIHLPKVEQVKIREILAKEPEEKGRFAEGNTQIMLMCTSRTIEAKYIDYLTELSNWKVVPVGPPFQDLITNDADDVELIDWLGTKDENSTVFVSFGSEYFLSKEDMEEIAFGLELSNVNFIWVARFPKGEEQNLEDALPKGFLERIGERGRVLDKFAPQPRILNHPSTGGFVSHCGWNSAMESIDFGVPIIAMPIHNDQPINARLIVELGVAVEIVRDDDGKIHRGEIAETLKSVITGKTGENLRAKVRDISKNLKSIRGEEMDAAAEELIQLCKNSNKSK

SEQ ID NO: 364 - protein, 442 aa, Artificial Sequence
  engineered beta-1,2-glycosyltransferase encoded in plasmid pA29754
MASTLRVLMFPWLAYGHISPFLNLAKKLADRGFLIYLCSTPINLKSIKKKIPEKYSDSIQLVELHLPELPELPPHYHTTNGLPPHLNPTLQKALKMSKPNFSKILKNLKPDLVIYDVLQQWAEHVANEQNIPAVKLLTSCAAVFSYFFNFVKKPGVEFPFPAIHLPKVEQVKIREILAKEPEEKGRFAEGNMQIMLMCTSREIEAKYIDYLSELSNWKVVPVGPPFQDLITNDADDVELIDWLGKKDENSTVFVSFGSEYFLSKEDMEEIAFGLELSNVNFIWVARFPKGEEQNLEDALPKGFLERIGERGRVLDKFAPQPRILNHPSTGGFISHCGWNSAMESIDFGVPIIAMPIHNDQPINARLMVELGVAVEIVRDDDGKIHREEIAETLKDVITGKTGENLRKKVRDISKNLKSIRGEEMDAAAEELIQLCKNSNKSK

SEQ ID NO: 365 - protein, 442 aa, Artificial Sequence
  engineered beta-1,2-glycosyltransferase encoded in plasmid pA29755
MATTLRVLMFPWLAYGHISPFLNLAKKLADRGFLIYLCSTPINLKSIKKKIPEKYSDSIQLVELHLPELPELPPHYHTTNGLPPHLNPTLQKALKMSKPNFSKILQNLKPDLLIYDVLQQWAEHVANEQNIPAVKLLTSCAAVFSYFFNFVRKPGVEFPFPAIHLPKVEQVKIREILAKEPEDKGRFAEGNMQIMLMCTSREIEAKYIDYLSELSNWKVVPVGPPFQDLITNDADDVELIDWLGTKDENSTVFVSFGSEYFLSKEDMEEIAFGLELSNVNFIWVARFPKGEEQNLEDALPKGFLERIGERGRVLDKFAPQPRILNHPSTGGFISHCGWNSAMESIDFGVPIIAMPIHNDQPINARLMVELGVAVEIVRDDDGKIHREEIAETLKDVITGKIGENLRAKVRDISKNLKSIRGEEMDAAAEELIQLCKNSNKSK

SEQ ID NO: 366 - protein, 442 aa, Artificial Sequence
  engineered beta-1,2-glycosyltransferase encoded in plasmid pA29756
MATTLRVLMFPWLAYGHISPFLNVAKKLADRGFLIYLCSTPINLKSIKKKIPEKYSDSIQLVELHLPELPELPPHYHTTNGLPPHLNPTLKKALKMSKPNFSKILQNLKPDLVIYDVLQQWAEHVANEQNIPAVKLLTSCAAVFSYFFNFVKKPGVEFPFPAIHLPKVEQVKIREILAKEPEEKGRLAEGNMQIMLMCTSRTIEAKYIDYLTELSNWKVVPVGPPFQDLITNDADDVELIDWLGTKDENSTVFVSFGSEYFLSKEDMEEIAFGLELSNVNFIWVARFPKGEEQNLEDALPKGFLERIGERGRVLDKFAPQPRILNHPSTGGFISHCGWNSAMESIDFGVPIIAMPIHNDQPINARLIVELGVAVEIVRDDDGKIHRGEIAETLKGVITGKTGENLRAKVRDISKNLKSIRDEEMDAAAEELIQLCKNSNKSK

SEQ ID NO: 367 - protein, 442 aa, Artificial Sequence
  engineered beta-1,2-glycosyltransferase encoded in plasmid pA29757
MATTLRVLMFPWLAYGHISPFLNVAKKLADRGFLIYLCSTPINLKSIKKKIPEKYSDSIQLVELHLPELPELPPHYHTTNGLPPHLNPTLKKALKMSKPNFSKILQNLKPDLVIYDVLQQWAEHVANEQNIPAVKLLTSCAAVFSYFFNFVKKPGVEFPFPAIHLPKVEQVKIREILAKEPEDKGRFAEGNMQIMLMCTSRAIEAKYIDYLSELSNWKVVPVGPPFQDLITNDDDDMELIDWLGKKDENSTVFVSFGSEYFLSKEDMEEIAFGLELSNVNFIWVARFPKGEEQNLEDALPKGFLERIGERGRVLDKFAPQPRILNHPSTGGFISHCGWNSAMESIDFGVPIIAMPIHNDQPINARLMVELGVAVEIVRDDDGKIHRGEIAETLKDVITGKTGENLRAKVRDISKNLKSIRGEEMDAVAEELIQLCKNSNKSK

SEQ ID NO: 368 - protein, 442 aa, Artificial Sequence
  engineered beta-1,2-glycosyltransferase encoded in plasmid pA29758
MASNLRVLMFPWLAYGHISPFLNLAKKLADRGFLIYLCSTPINLKSIKKKIPEKYSDSIQLVELHLPELPELPPHYHTTNGLPPHLNPTLQKALKMSKPNFSKILQNLKPDLVIYDVLQQWAEHVANEQNIPAVKLLTSCAAVFSYFFNFVKKPGVEFPFPAIHLPKVEQVKIREILAKEPEEKGRFAEGNMQIMLMCTSRTIEAKYIDYLSELSNWKVVPVGPPFQDLITNDADDVELIDWLGTKDENSTVFVSFGSEYFLSKEDMEEVAFGLELSNVNFIWVARFPKGEEQNLEDALPKGFLERIGERGRVLDKFAPQPRILNHPSTGGFISHCGWNSAMESIDFGVPIIAMPIHNDQPINARLMVELGVAVEIVRDDDGKIHRGEIAETLKDVITGKTGENLRAKVRDISKNLKSIRGEEMDAAAEELIQLCKNSNKSK

SEQ ID NO: 369 - protein, 442 aa, Artificial Sequence
  engineered beta-1,2-glycosyltransferase encoded in plasmid pA29759
MATTLKVLMFPWLAYGHISPFLNLAKKLADRGFLIYLCSTPINLKSIKKKIPEKYSDSIQLVELHLPELPELPPHYHTTNGLPPHLNPTLQKALKMSKPNFSKILKNLKPDLVIYDVLQQWAEHVANEQNIPAVKLLTSCAAVFSYFFNFVKKPGVEFPFPAIHLPKVEQVKIREILAKEPEDKGRFAEGNMQIMLMCTSRIIEAKYIDYLSELSNWKVVPVGPPFQDLITNDDDDVELIDWLGKKDENSTVFVSFGSEYFLSKEDMEEIAFGLELSNVNFIWVARFPKGEEQNLEDALPKGFLERIGERGRVLDKFAPQPRILNHPSTGGFISHCGWNSAMESIDFGVPIIAMPIHNDQPINARLMVELGVAVEIVRDDDGKIHREEIAEVLKDVITGKTGENLRAKVRDISKNLKSIRGEEMDAAAEELIQLCKNSNKSK

SEQ ID NO: 370 - protein, 442 aa, Artificial Sequence
  engineered beta-1,2-glycosyltransferase encoded in plasmid pA29760
MATTLRVLMFPWLAYGHISPFLNVAKKLADRGFLIYLCSTPINLNSIKKKIPEKYSDSIQLVELHLPELPELPPHYHTTNGLPPHLNPTLKKALKMSKPNFSKILQNLKPDLVIYDVLQQWAEHVANEQNIPAVKLLTSCAAVFSYFFNFVRKPGVEFPFPAIHLPKVEQVKIREILAKEPEEKGRFAEGNMQIMLMCTSRTIEAKYIDYLTELSNWKVVPVGPPFQDLITNDADDVELIDWLGTKDENSTVFVSFGSEYFLSKEDMEEIAFGLELSNVNFIWVARFPKGEEQNLEDALPKGFLERIGERGRVLDKFAPQPRILNHPSTGGFISHCGWNSAMESIDFGVPIIAMPIHNDQPINARLMVELGVAVEIVRDDDGKIHRGEIAETLKSVITGKTGENLRAKVRDISKNLKSIRGEEMDAAAEELIQLCKNSNKSK

SEQ ID NO: 371 - protein, 442 aa, Artificial Sequence
  engineered beta-1,2-glycosyltransferase encoded in plasmid pA29761
MATTLRVLMFPWLAYGHISPFLNLAKKLADRGFLIYLCSTPINLKSIKKKIPEKYSDSIQLVELHLPELPELPPHYHTTNGLPPHLNPTLQKALKMSKPNFSKILQNLKPDLVIYDVLQQWAEHVANEQNIPAVKLLTSCAAVFSYFFNFVKKPGVEFPFPAIHLPKVEQVKIREILAKEPEEKGRFAEGNSQIMLMCTSRTIEAKYIDYLTELSNWKVVPVGPPFQDLITNDADDVELIDWLGTKDENSTVFVSFGSEYFLSKEDMEEIAFGLELSNVNFIWVARFPKGEEQNLEDALPKGFLERIGERGRVLDKFAPQPRILNHPSTGGFVSHCGWNSAMESIDFGVPIIAMPIHNDQPINARLIVELGVAVEIVRDDDGKIHRGEIAETLKGVITGKTGENLRAKVRDISKNLKSIRGEEMDAAAEELIQLCKNSNKSK

SEQ ID NO: 372 - protein, 442 aa, Artificial Sequence
  engineered beta-1,2-glycosyltransferase encoded in plasmid pA29762
MATTLRVLMFPWLAYGHISPFLNLAKKLADRGFLIYLCSTPINLKSIKKKIPEKYSDSIQLVELHLPELPELPPHYHTTNGLPPHLNPTLQKALKMSKPNFSKILKNLKPDLVIYDVLQQWAEHVANEQNIPAVKLLTSCAAVFSYFFNFVKKPGVEFPFPAIHLPKVEQVKIREILAKEPEEKGRFAEGNMQIMLMCTSRTIEAKYIDYLSELSNWKVVPVGPPFQDLITNDDDDVELIDWLGKKDENSTVFVSFGSEYFLSKEDMEEIAFGLELSNVNFIWVARFPKGEEQNLEDALPKGFLERIGERGRVLDKFAPQPRILNHPSTGGFISHCGWNSAMESIDFGVPIIAMPIHNDQPINARLMVELGVAVEIVRDDDGKIHREEIAEVLKDVITGKIGENLRKKVRDISKNLKSIRGEEMDAAAEELIQLCKNSNKSK

SEQ ID NO: 373 - protein, 442 aa, Artificial Sequence
  engineered beta-1,2-glycosyltransferase encoded in plasmid pA29763
MATTLRVLMFPWLAYGHISPFLNVAKKLADRGFLIYLCSTPINLKSIKKKIPEKYSDSIQLVELHLPELPELPPHYHTTNGLPPHLNPTLKKALKMSKPNFSKILQNLKPDLLIYDVLQQWAEHVANEQNIPAVKLLTSCAAVFSYFFHFVKKPGVEFPFPAIHLPKVEQVKIREILAKEPEDKGRFAEGNMQIMLMCTSRAIEAKYIDYLSELSNWKVVPVGPPFQDLITNDDDDVELIDWLGTKDENSTVFVSFGSEYFLSKEDMEEIAFGLELSNVNFIWVARFPKGEEQNLEDALPKGFLERIGERGRVLDKFAPQPRILNHPSTGGFISHCGWNSAMESIDFGVPIIAMPIHNDQPINARLIVELGVAVEIVRDDDGKIHRGEIAETLKDVITGKTGENLRAKVRDISKNLKSIRGEEMDAAAEELIQLCKNSNKSK

SEQ ID NO: 374 - protein, 442 aa, Artificial Sequence
  engineered beta-1,2-glycosyltransferase encoded in plasmid pA29764
MATTLRVLMFPWLAYGHISPFLNLAKKLADRGFLIYLCSTPINLKSIKKKIPEKYSDSIQLVELHLPELPELPPHYHTTNGLPPHLNPTLQKALKMSKPNFSKILQNLKPDLVIYDVLQQWAEHVANEQNIPAVKLLTSCAAVFSYFFNFVKKPGVEFPFPAIHLPKVELVKIREILAKEPEDKGRFAEGNMQIMLMCTSRIIEAKYIDYLSELSNWKVVPVGPPFQDLITNDDDDMELIDWLGKKDENSTVFVSFGSEYFLSKEDMEEIAFGLELSNVNFIWVARFPKGEEQNLEDALPKGFLERIGERGRVLDKFAPQPRILNHPSTGGFISHCGWNSAMESIDFGVPIIAMPIHNDQPINARLMVELGVAVEIVRDDDGKIHREEIAETLKDVITGKTGENLRAKVRDISKNLKSIRGEEMDAAAEELIQLCKNSNKSK

SEQ ID NO: 375 - protein, 442 aa, Artificial Sequence
  engineered beta-1,2-glycosyltransferase encoded in plasmid pA29765
MATTLRVLMFPWLAYGHISPFLNVAKKLADRGFLIYLCSTPINLKSIKKKIPEKYSDSIQLVELHLPELPELPPHYHTTNGLPPHLNPTLQKALKMSKPNFSKILQNLKPDLVIYDVLQQWAEHVANEQNIPAVKLLTSCAAVFSYFFNFVKKPGVEFPFPAIHLPKVEQVKIREILAKEPEEKGRFAEGNMQIMLMCTSRTIEAKYIDYFTELSNWKVVPVGPPFQDLITNDADDVELIDWLGTKDENSTVFVSFGSEYFLSKEDMEEIAFGLELSNVNFIWVARFPKGEEQNLEDALPKGFLERIGERGRVLDKFAPQPRILNHPSTGGFISHCGWNSAMESIDFGVPIIAMPIHNDQPINARLMVELGVAVEIVRDDDGKIHRGEIAETLKSVITGETGENLRAKVRDISKNLKSIRGEEMDAAAEELIQLCKNSNKSK

SEQ ID NO: 376 - protein, 442 aa, Artificial Sequence
  engineered beta-1,2-glycosyltransferase encoded in plasmid pA32567
MATNLRVLMFPWLAEGHIEPFLNIAKQLADRGFLIYLCSTRINLESIIKKIPEKYADSIHLIELQLPELPELPPHYHTTNGLPPHLNPTLHKALKMSKPNFSRILQNLKPDLLIYDFLQPWAEHVANEQNIPAGKLLTSCAAVFSYFFSFRKNPGVEFPFPAINLPEVEKVKIREILAKEPDEGGRLDEGNKQMMLMCTSRTIEAKYIDYCTELCNWKVVPVGPPFQDLITNDADNKELIDWLGTKHENSTVYVSFGSEYFLSKEDMEEVAFALELSNVNFIWVARFPKGEERNLEDALPKGFLERIGERGRVLDHFAPQPRILNHPSTGGFISHCGWNSALESIDFGVPIIAMPIQNDQPINAKLMVELGVAVEIVRDDDGKIHRGEIAETLKSVVTGETGEILRAKVREISENLKSIRDEEMDAVAEELIQLCRNSNKSK

SEQ ID NO: 377 - protein, 442 aa, Artificial Sequence
  engineered beta-1,2-glycosyltransferase encoded in plasmid pA32568
MATNLRVLMFPWLAEGHIEPFLNIAKQLADRGFLIYLCSTRINLESIIKKIPEKYADSIHLIELQLPELPELPPHYHTTNGLPPHLNPTLHKALKMSKPNFSRILQNLKPDLLIYDFLQPWAEHVANEQNIPAGKLLTSCAAVFSYFFSFRKNPGVEFPFPAINLPEVEKVKIREILAKEPDEGGRLDEGNKQMMLMCTSRTIEAKYIDYCTELCNWKVVPVGPPFQDLITNDADNKELIDWLGTKHENSTVYVSFGSEYFLSKEDMEEVAFALELSNVNFIWVARFPKGEERNLEDALPKGFLERIGERGRVLDHFAPQPRILNHPSTGGFISHCGWNSALESIDFGVPIIAMPIQFDQPINAKLMVELGVAVEIVRDDDGKIHRGEIAETLKSVVTGETGEILRAKVREISENLKSIRDEEMDAVAEELIQLCRNSNKSK

SEQ ID NO: 378 - protein, 442 aa, Artificial Sequence
  engineered beta-1,2-glycosyltransferase encoded in plasmid pA32569
MATNLRVLMFPWLAEGHIEPFLNIAKQLADRGFLIYLCSTRINLESIIKKIPEKYADSIHLIELQLPELPELPPHYHTTNGLPPHLNPTLHKALKMSKPNFSRILQNLKPDLLIYDVLQPWAEHVANEQNIPAGKLLTSCAAVFSYFFSFRKNPGVEFPFPAIHLPEVEKVKIREILAKEPEEGGRLDEGNKQMMLMCTSRTIEAKYIDYCTELCNWKVVPVGPPFQDLITNDADNKELIDWLGTKHENSTVYVSFGSEYFLSKEDMEEVAFALELSNVNFIWVARFPKGEERNLEDALPKGFLERIGERGRVLDKFAPQPRILNHPSTGGFISHCGWNSAMESIDFGVPIIAMPIHNDQPINAKLMVELGVAVEIVRDDDGKIHRGEIAETLKSVVTGETGEILRAKVREISKNLKSIRDEEMDAVAEELIQLCRNSNKSK

SEQ ID NO: 379 - protein, 442 aa, Artificial Sequence
  engineered beta-1,2-glycosyltransferase encoded in plasmid pA32570
MATNLRVLMFPWLAEGHIEPFLNIAKQLADRGFLIYLCSTRINLESIIKKIPEKYADSIHLIELQLPELPELPPHYHTTNGLPPHLNPTLHKALKMSKPNFSRILQNLKPDLLIYDVLQPWAEHVANEQNIPAGKLLTSCAAVFSYFFSFRKNPGVEFPFPAIHLPEVEKVKIREILAKEPDEGGRLDEGNKQMMLMCTSRTIEAKYIDYCTELCNWKVVPVGPPFQDLITNDADNKELIDWLGTKHENSTVYVSFGSEYFLSKEDMEEVAFALELSNVNFIWVARFPKGEERNLEDALPKGFLERIGERGRVLDKFAPQPRILNHPSTGGFISHCGWNSALESIDFGVPIIAMPIHFDQPINAKLMVELGVAVEIVRDDDGKIHRGEIAETLKSVVTGETGEILRAKVREISKNLKSIRDEEMDAVAEELIQLCRNSNKSK

SEQ ID NO: 380 - protein, 442 aa, Artificial Sequence
  engineered beta-1,2-glycosyltransferase encoded in plasmid pA32571
MATNLRVLMFPWLAEGHIEPFLNIAKQLADRGFLIYLCSTRINLESIIKKIPEKYADSIHLIELQLPELPELPPHYHTTNGLPPHLNPTLHKALKMSKPNFSRILQNLKPDLLIYDVLQPWAEHVANEQNIPAGKLLTSCAAVFSYFFSFRKNPGVEFPFPAIHLPEVEKVKIREILAKEPDEGGRLDEGNKQMMLMCTSRTIEAKYIDYCTELCNWKVVPVGPPFQDLITNDADNKELIDWLGTKHENSTVYVSFGSEYFLSKEDMEEVAFALELSNVNFIWVARFPKGEERNLEDALPKGFLERIGERGRVLDKFAPQPRILNHPSTGGFISHCGWNSALESIDFGVPIIAMPIHNDQPINAKLMVELGVAVEIVRDDDGKIHRGEIAETLKSVVTGETGEILRAKVREISKNLKSIRDEEMDAVAEELIQLCRNSNKSK

SEQ ID NO: 381 - protein, 442 aa, Artificial Sequence
  engineered beta-1,2-glycosyltransferase encoded in plasmid pA32572
MATNLRVLMFPWLAEGHIEPFLNIAKQLADRGFLIYLCSTRINLESIIKKIPEKYADSIHLIELQLPELPELPPHYHTTNGLPPHLNPTLHKALKMSKPNFSRILQNLKPDLLIYDFLQPWAEHVANEQNIPAGKLLTSCAAVFSYFFSFRKNPGVEFPFPAIHLPEVEKVKIREILAKEPDEGGRLDEGNKQMMLMCTSRTIEAKYIDYCTELCNWKVVPVGPPFQDLITNDADNKELIDWLGTKHENSTVYVSFGSEYFLSKEDMEEVAFALELSNVNFIWVARFPKGEERNLEDALPKGFLERIGERGRVLDHFAPQPRILNHPSTGGFISHCGWNSALESIDFGVPIIAMPIHNDQPINAKLMVELGVAVEIVRDDDGKIHRGEIAETLKSVVTGETGEILRAKVREISENLKSIRDEEMDAVAEELIQLCRNSNKSK

SEQ ID NO: 382 - protein, 442 aa, Artificial Sequence
  engineered beta-1,2-glycosyltransferase encoded in plasmid pA32573
MATNLRVLMFPWLAEGHIEPFLNIAKQLADRGFLIYLCSTRINLESIIKKIPEKYADSIHLIELQLPELPELPPHYHTTNGLPPHLNPTLHKALKMSKPNFSRILQNLKPDLLIYDFLQPWAEHVANEQNIPAGKLLTSCAAVFSYFFSFRKNPGVEFPFPAIHLPEVEKVKIREILAKEPDEGGRLDEGNKQMMLMCTSRTIEAKYIDYCTELCNWKVVPVGPPFQDLITNDADNKELIDWLGTKHENSTVYVSFGSEYFLSKEDMEEVAFALELSNVNFIWVARFPKGEERNLEDALPKGFLERIGERGRVLDHFAPQPRILNHPSTGGFISHCGWNSALESIDFGVPIIAMPIHNDQPINAKLMVELGVAVEIVRDDDGKIHRGEIAETLKSVVTGETGEILRAKVREISKNLKSIRDEEMDAVAEELIQLCRNSNKSK

SEQ ID NO: 383 - protein, 442 aa, Artificial Sequence
  engineered beta-1,2-glycosyltransferase encoded in plasmid pA32574
MATNLRVLMFPWLAEGHIEPFLNIAKQLADRGFLIYLCSTRINLESIIKKIPEKYADSIHLIELQLPELPELPPHYHTTNGLPPHLNPTLHKALKMSKPNFSRILQNLKPDLLIYDFLQPWAEHVANEQNIPAGKLLTSCAAVFSYFFSFRKNPGVEFPFPAIHLPEVEKVKIREILAKEPDEGGRLDEGNKQMMLMCTSRTIEAKYIDYCTELCNWKVVPVGPPFQDLITNDADNKELIDWLGTKHENSTVYVSFGSEYFLSKEDMEEVAFALELSNVNFIWVARFPKGEERNLEDALPKGFLERIGERGRVLDHFAPQPRILNHPSTGGFISHCGWNSAMESIDFGVPIIAMPIHNDQPINAKLMVELGVAVEIVRDDDGKIHRGEIAETLKSVVTGETGEILRAKVREISKNLKSIRDEEMDAVAEELIQLCRNSNKSK

SEQ ID NO: 384 - protein, 442 aa, Artificial Sequence
  engineered beta-1,2-glycosyltransferase encoded in plasmid pA32576
MATNLRVLMFPWLAEGHISPFLNIAKQLADRGFLIYLCSTRINLESIIKKIPEKYADSIHLIELQLPELPELPPHYHTTNGLPPHLNPTLHKALKMSKPNFSRILQNLKPDLLIYDFLQPWAEHVANEQNIPAGKLLTSCAAVFSYFFSFRKNPGVEFPFPAIHLPEVEKVKIREILAKEPDEGGRLDEGNKQMMLMCTSRTIEAKYIDYCTELCNWKVVPVGPPFQDLITNDADNKELIDWLGTKHENSTVYVSFGSEYFLSKEDMEEVAFALELSNVNFIWVARFPKGEERNLEDALPKGFLERIGERGRVLDKFAPQPRILNHPSTGGFISHCGWNSAMESIDFGVPIIAMPIHNDQPINAKLMVELGVAVEIVRDDDGKIHRGEIAETLKSVVTGETGEILRAKVREISKNLKSIRDEEMDAVAEELIQLCRNSNKSK

SEQ ID NO: 385 - protein, 442 aa, Artificial Sequence
  engineered beta-1,2-glycosyltransferase encoded in plasmid pA33083
GATILRVLMFPWLAYGHIGPFLNIAKQLADRGFLIYLCSTRINLEMIKKKITEKYADSIHLIELTLPELPELPPHYHTTNALPPHLNATLHKALKLSKPELSRILQNLKPDLLIYDVLAPWAEQVANEQNIPAGKLLTSCAAVFAYMFQFRKNPGVPFPFPAIHLPEVEKRKIREILAKLPEELGRLDEQNKQMMLMCTSRLIEAKYIDYCAKLCNWKVVPVGPPYQDLEMSDARNKELIDWLGTKHTNSTVFVSFGSEYFLSKEDMEEVAWALELSNVNFIWVARFPKGEEANLEDALPKGFLDRAGERGRVLTGFAPQQRILNHKSTGGFISHCGWNSAMEAIDFGTPIIAMPQTNDQPINAKLMVELGVAVEVRRDDDGKVHRGSLAKTLKSVVTGETGEVLRANVRELARALKSSRDEEMTAVALELIKLCRNSNKTK

SEQ ID NO: 386 - protein, 442 aa, Artificial Sequence
  engineered beta-1,2-glycosyltransferase encoded in plasmid pA33084
GAGSLRVTMFPWQAQGHISPFLCLAKQLADRGFLIELVNTRINLESIKKKITEKYAFSIHLWELTLPELPELPSHLWTTNGLPPHLNATLRKALKMAKGNFSRNSENIRADLLISDVLQPWSEQVANDQGIPAGKLLTSCAAVFAYMKSFRKNPGVEFPFEAISLPESELVKLQEAVRRLPEELGRLMEQNAQMMLMCTSRTIEAKYIDYCAKLANWQVVPVGPPFQDLITNDADNKELIDWLGTKHENSTVFVSFGSEYFLSKEDMEEVAFALELSNVNFIWVARFPKGEERNLEDALPKGFLERIGERGRVLDKFAPQPRILNHPSTGGFISHCGWNSAMESIDFGVPIIAMPIHNDQPINAKLMVELGVAVEIVRDDDGKIHRGEIAETLKSVVTGETGEILRAKVREISKNLKSIRDEEMDAVAEELIQLCRNSNKSK

SEQ ID NO: 387 - protein, 442 aa, Artificial Sequence
  engineered beta-1,2-glycosyltransferase encoded in plasmid pA33085
LADNLRVLMFPWLALGHILPFLCIAKQLADRGFIIYLLSTKINLEMIIKKITYKYADLIILIELQLPELPELPPHYHTTNGLPPALNKVLHKALKLSKGEVSRILSTLKPDLLIYDLLAPWASHLALEQNIPAGKLLTSCAAVFAYFFSFRKNPGLPFLFPAIRLPEVEKVKILEALATLPTEGGRLDVGQVQMMLMCTSRTIEAKYIDYCTKLCNWKVVPVGTPFLLLLPLDADNKELIRWLGTKHSHSTVFVSFGSEYFLSHEQMEELAFALVLSGVPFIWVARFPKGAERSLEDALPKGFLERVGERGRVLTGFAPQARILNHPSTGGFMSHCGWNSAMEAIDFGVPIIAMPILNDQPINAKLMVELGVAVEIVRDDEGKVHRAELAEVLRSVVQGATGEILRKKVREIILALKSIRDLEMDAVAEELIQLCRNSRKSK

SEQ ID NO: 388 - protein, 442 aa, Artificial Sequence
  engineered beta-1,2-glycosyltransferase encoded in plasmid pA33086
MATNLRVLMFPWLAYGHISPFLNIAKQLADRGFLIYLCSTRINLESIIKKIPEKYADSIHLIELQLPELPELPPHYHTTNGLPPHLNPTLHKALKMSKPNFSRILQNLKPDLLIYDVLQPWAEHVANEQNIPAGKLLTSCAAVFSYFFSFRKNPGVEFPFPAIHLPEVEKVKIREILAKEPEEGGRLDEGNKQMMLMCTSRTIEAKYIDYCTELCNWKVVPVGPPYLLLVAPDASNTELIHWLGTKPPNSTVFVSFGSEYFLSKEQMEEIAFALVLSNVPFIWVVRFPKGEERNLIDALPPGFLDRIRERGRVLPKFAPQQRILNHKSTGGFISHCGWNSAMEAIDFGVPIIAMPITNDQPINAKLMVELGVAVEIRRDDEGLIPREEILRTLKSVMTGELGERLRRNVAELAKRLKRARDEEMTIVAEELIQLCRNSSKLK

SEQ ID NO: 389 - protein, 442 aa, Artificial Sequence
  engineered beta-1,2-glycosyltransferase encoded in plasmid pA33087
GAPLLRVLMFPWLALGHILPFLCIAKQLADRGFIIYLLNTRIMLELIIKKIPEKYLRLIILWTVSLHLLPELPPYLHTTNGLPPHLNALLHKLLQMAAPTLSRIIRNLNIALLIYDVLLPWASHLAEEQGIPAGKLLTSCAAVFAYMVTFNKNPGFEFPFPEIHLPEVEKDKTQEIVAYVREDAGRLVHFRVQMMLMCTSRTIEATYIDYLMDLDNWKVVPVGPPFQDLITNDADNKELIDWLGTKHENSTVFVSFGSEYFLSKEDMEEVAFALELSNVNFIWVARFPKGEERNLEDALPKGFLERIGERGRVLDKFAPQPRILNHPSTGGFISHCGWNSAMESIDFGVPIIAMPIHNDQPINAKLMVELGVAVEIVRDDDGKIHRGEIAETLKSVVTGETGEILRAKVREISKNLKSIRDEEMDAVAEELIQLCRNSNKSK

SEQ ID NO: 390 - protein, 442 aa, Artificial Sequence
  engineered beta-1,2-glycosyltransferase encoded in plasmid pA33088
LAQNLRVTMFPWQAQGHIGPFLSIAKQLADRGFLIYLCSSKVNLESAKKKITEKYADSIHLIELPLPELPELPPHYHTTNALPPHLNKTLRKALKMAKPNFSRILSNLKPTLLIADVLQPWSETVANGQNVPAGKLLTSCAAVFAYFWSFRTNPGVEFPFEAIHLPESAKVKIYEALAKVSEEGFRLDEANKQMMLMCTSRTIEAKYIDYCAEFANWQVVPVGPPFQTLIFEDASNKELTRWLGTKPEHSTVFVSFGSEAFLSKEQMEEVAFALELSNSNFIWVARFPKGEERTLEDALPPGFLERVGERGRVLDRFAPQPRILNHPATGGVISHCGWNSAMEAIDFGTPIIAMPIHNDQPINAKLMMELGVAVEIVRRDLGKIHREEIARVLKSVVTGELGEKLRANCRELSKLLKSSRDEEMGAVAEELMRLCRHSNKTK

SEQ ID NO: 391 - protein, 442 aa, Artificial Sequence
  engineered beta-1,2-glycosyltransferase encoded in plasmid pA33089
MATSLTVLMFPWLAYGHISPFLNIAKQLADRGFIIYLLSTRINLESIIKKITEKYQDLIHLIELTLPELPELPPHYHTTNALPPHLNKTLHKALKMSAPEFSRILQTLRADLLIYDVLAPWASQVANSQNIPSGRLLTSCAAVFAYFFEWRKNPGVPFPFPAIRLPEVELVKIIEILIGLPPELGRLDEQNVQMMLMCTSREIEAKYIDYCQKLCNWKVVPVGTPFQDLEQNDARNKELIDWLGTKHTNSTVFVSFGSEYFLSKEQMEEVAFALVVSNVNFIWVVRFPKGVEANLIDALPNGFLDRIRERGRVLTGFAPQPHILNHKSTGGFISHCGWNSAMEAIDFGVPIIAMPIQNDQPINAKLMVELGVAVEVRRDDEGKITRDELVEVLKSVVTSETGEILRAKVAEIAKNLKRIRDLEMDIVAETLIQLCRNSNKSK

SEQ ID NO: 392 - protein, 442 aa, Artificial Sequence
  engineered beta-1,2-glycosyltransferase encoded in plasmid pA33090
MAGSLRVTMFPWQAQGHISPFLSLAKQLADRGFLIEVCNTRINLESIKKKITEKYADSIHLWELTLPELPELPPHLWTTNGLPPHLNATLRKALKMAKPNFSRISSDLKADLLISDVLQPWSEKVANDTNIPAGRLLTSCAAVFAYMKSFNKNPGVEFPFEAIHLPEVELVKIQEALRKEPEEGGRLMEQNAQAMLMCTSRTIEAKYIDYCAELANWQVVPVGPPFQTLIYLDASNKELMDWLGTKPENSTVFVSFGSEYFLSKEDMEEVAFALELSNSNFIWVARFPKGEERSLEDALPKGFLERARERGRVVDKFAPQPAILNHPSTGGFISHCGWNSAMEAIDGGVPIIAMPIHNDQPINAKLMVELGVAVEIRRDDDGRITRDEIAETLKSVVTGETGEILRARCRELSKRLKRARDEEMDAVAEELRQLGRNSSKSV

SEQ ID NO: 393 - protein, 442 aa, Artificial Sequence
  engineered beta-1,2-glycosyltransferase encoded in plasmid pA33091
MADNLKVLMFPWLALGHILPFLCIAKQLADRGFIIYLLNTRINLESIIKKIPNKYASLIHLIELSLPELPELPPYYHTTNGLPPHLNALLHKALKLSKGEYSRILQNLKPDLLIYDLLQPWAEHVANEQGIPAGKLLTSCAAVFSYMVSFRDNPGEEFPFEAIHLPEKAKVKLQEILAYLREEAFRLMEGNVQMMLMCTSRTIEAKYIDYCTDLDNWKVVPVGPPYLLLITNDLDNKELIDWLGTKHTHSTVFVSFGSEYFLSKRDMEEVAWALVLSNVNFIWVARFPKGEEALLIDALPKGFLDRIRERGRVLDKFAPQLRILNHKSTGGFISHCGWNSAMEAIDFGVPIIAMPILNDQPINAKLMVELGVAVEIRRDDDGKITREELLKVLRSVVTGELGEILRRRVREIAERLKRIRDEEMDIVAEELIQLCRNSNKAV

SEQ ID NO: 394 - protein, 442 aa, Artificial Sequence
  engineered beta-1,2-glycosyltransferase encoded in plasmid pA33092
GATILTVLMFPWLALGHILPFLNIAKQLADRGFLIYLLSTRINLELIKKKITEKYADLIQLIELTLPELPELPPHYHTTNALPPHLNMTLHKALKMSAPEFSRILQNLKADLLIYDVLAPWASKVAESQNIPAGRLLTSCAAVFAYMFTWRDLPGVEFPFPAIRLPEVALVKIIEILAGLPPELGRLDEQNVQIMLMCTSREIEAKYIDYCQKLLNWKVVPVGTPFQDLITNDADNKELIDWLGTKHENSTVFVSFGSEYFLSKEDMEEVAFALELSNVNFIWVARFPKGEERNLEDALPKGFLERIGERGRVLDKFAPQPRILNHPSTGGFISHCGWNSAMESIDFGVPIIAMPIHNDQPINAKLMVELGVAVEIVRDDDGKIHRGEIAETLKSVVTGETGEILRAKVREISKNLKSIRDEEMDAVAEELIQLCRNSNKSK

SEQ ID NO: 395 - protein, 442 aa, Artificial Sequence
  engineered beta-1,2-glycosyltransferase encoded in plasmid pA33094
MAGNLRVTMFPWLAQGHISPFLSIAKQLADRGFLIELLNTRINLESIIKKITEKYAFSIHLWELTLPELPELPSHLWTTNGLPPHLNATLRKALKMAKGNFSRISSDLRADLLIYDVLQPWAEHVANRQGIPAGKLLTSCAAVFAYMKSFNKNPGVEFPFEAISLPESELVKLYEAVARLPEELGRLMEGNAQMMLMCTSRTIEAKYIDYCTKLANWKVVPVGPPFQTLIYLDADNTELMRWLGTKHENSTVFVSFGSEYFLSKEDMEEVAFALELSGANFIWVARFPKGEERSLEDALPKGFSERARERGRVLDKFAPQPAILSHPSTGGFISHCGWNSAMEAIDFGVPIIAMPQHNDQPINAKLMVELGVAVEVSRDDDGKITRDEIAEVLRSVVTGPTGEILRKRCREIAKLLKRIRDEEMDAVAEELRALGRNSSKSK

SEQ ID NO: 396 - protein, 442 aa, Artificial Sequence
  engineered beta-1,2-glycosyltransferase encoded in plasmid pA33095
MATNLRVLMFPWLAYGHISPFLNIAKQLADRGFLIYLCSTRINLESIIKKIPEKYADSIHLIELQLPELPELPPHYHTTNGLPPHLNPTLHKALKMSKPNFSRILQNLKPDLLIYDVLQPWAEHVANEQNIPAGKLLTSCAAVFSYFFSFRKNPGVEFPFPAIHLPEVEKVKIREILAKEPEEGGRLDEGNKQMMLMCTSRTIEAKYIDYCTELCNWKVVPVGPPFQDLLYSDADNKELIRWLGTKHTNSTVFVSFGSEYFLSKRQMEEVAFALELSNVNFIWVARFPKGEEANLEDALPKGFLDRAGERGRVLTGFAPQQRVLNHKSTGGFISHCGWNSAMEAIDFGTPIIAMPQTNDQPINAKLMRELGVAVEVSRDDDGLVTRDELAKTLKSVVTGETGESLRANVAELARRLKSSRDEEMTIVALELIKLCRNSNKTK

SEQ ID NO: 397 - protein, 442 aa, Artificial Sequence
  engineered beta-1,2-glycosyltransferase encoded in plasmid pA33096
GAPSQKVLMFPWQAQGHIGPFLNLARDLADRGFTIYLVSTRIMLELTKKKIPNKYARLIQLWESSLHHLPELPPHLHTTNGLPPHLNAVLHKALQLAKPNVSRVISTLNSSLLLADALQPWASHLALEQGIPAGKVLTSCAAVFAYMKTFNKNPGSEFPFPEIRLPENAKIKLLEAMRYLPEDAGRLSEAQVQIMLMCTSRTIEATYIDYLTELDNWKVVPVGPPFQDLITNDADNKELIDWLGTKHENSTVFVSFGSEYFLSKEDMEEVAFALELSNVNFIWVARFPKGEERNLEDALPKGFLERIGERGRVLDKFAPQPRILNHPSTGGFISHCGWNSAMESIDFGVPIIAMPIHNDQPINAKLMVELGVAVEIVRDDDGKIHRGEIAETLKSVVTGETGEILRAKVREISKNLKSIRDEEMDAVAEELIQLCRNSNKSK

SEQ ID NO: 398 - protein, 442 aa, Artificial Sequence
  engineered beta-1,2-glycosyltransferase encoded in plasmid pA33097
GATLLKVTMFPWQAQGHINPFLNLAKQLADRGFLIEVLSTRVNLNLAKKKITNKYQGSIHLITLQLPELPELPSHYWTTNALPPHLNATLRKLLKMSAGNLSRNSENLKLALLIADFLQPWASKVANEQGVPSGKLLTSCAAVFAYMWQHNKNLGQEFPFPAINLPENALAKTYEALRKESEEAGRLSEANSNMMLMCTSREIEAKYIDYCAKFANWQVVPVGAPFQDLITNDADNKELIDWLGTKHENSTVFVSFGSEYFLSKEDMEEVAFALELSNVNFIWVARFPKGEERNLEDALPKGFLERIGERGRVLDKFAPQPRILNHPSTGGFISHCGWNSAMESIDFGVPIIAMPIHNDQPINAKLMVELGVAVEIVRDDDGKIHRGEIAETLKSVVTGETGEILRAKVREISKNLKSIRDEEMDAVAEELIQLCRNSNKSK

SEQ ID NO: 399 - protein, 442 aa, Artificial Sequence
  engineered beta-1,2-glycosyltransferase encoded in plasmid pA33098
GATNLRVAMFPWQAYGHIGPFLSIAKQMADRGFLIYLTSSRINLESIIKKIPNKYRRSIQLITLQLPHLPELPPHYHTTNGLPPHLNPTLHRALKLSKPNVSRTLQNLNPDLLVYDALQPWAEHVANEQGIPAGRLLTSCAAVFSYMFEVRDNLGEEFPFEAIHLPEVEKVKIREIVAYEPEEGGRLSEGNKQMMLMCTSRTIEAKYIDYCTKLDNWKVVPVGPPFLLLVTNDLDNKELMDWLGTKPPNSTVFVSFGSEAFLSKEDMEEIAFALELSNVNFIWVARFPKGEERRLEDALPPGFLERIRERGRVRDKFAPQPAILHHPSTGGFISHCGWNSAMESIDFGVPIIAMPIHNDQPINAKLMVELGVAVEVVRDDDGKVHRSALAECLKSVVTGETGEKLRRKVREIAKRLKASRDEEMTAVALALIQLCRNPNKAK

SEQ ID NO: 400 - protein, 442 aa, Artificial Sequence
  engineered beta-1,2-glycosyltransferase encoded in plasmid pA33099
MATNLRVLMFPWLAYGHISPFLNIAKQLADRGFLIYLCSTRINLESIIKKIPEKYADSIHLIELQLPELPELPPHYHTTNGLPPHLNPTLHKALKMSKPNFSRILQNLKPDLLIYDVLQPWAEHVANEQNIPAGKLLTSCAAVFSYFFSFRKNPGVEFPFPAIHLPEVEKVKIREILAKEPEEGGRLDEGNKQMMLMCTSRTIEAKYIDYCTELCNWKVVPVGPPYRDMSTEDADNTELIHWLGTKPPNSTVFVSFGSEYFLSKEQMEELAFALELSNVPFIWVARFPKGEEAPLEDALPPGFLDRIRERGRVRDRFAPQARILSHKSTGGVISHCGWNSAMEAIDFGVPIIAMPQHNDQPINAKLMVELGVAVEIRRQDEGKIPRDEILRTLKSVMTGETGERLRRNCAELARRLKSSRDEEMTIVAEELIKLCRNSNKSK

SEQ ID NO: 401 - protein, 442 aa, Artificial Sequence
  engineered beta-1,2-glycosyltransferase encoded in plasmid pA33100
MATNLRVLMFPWLAYGHISPFLNIAKQLADRGFLIYLCSTRINLESIIKKIPEKYADSIHLIELQLPELPELPPHYHTTNGLPPHLNPTLHKALKMSKPNFSRILQNLKPDLLIYDVLQPWAEHVANEQNIPAGKLLTSCAAVFSYFFSFRKNPGVEFPFPAIHLPEVEKVKIREILAKEPEEGGRLDEGNKQMMLMCTSRTIEAKYIDYCTELCNWKVVPVGPPYLLLITNDLDNKELIDWLGTKPTHSTVFVSFGSEYFLSKEDMEEVAWALVLSNVNFIWVARFPKGEERLLIDALPPGFLDRIRERGRVLDGFAPQLRILNHKSTGGFISHCGWNSAMEAIDFGVPIIAMPILNDQPINAKLMVELGVAVEIRRDDEGKIHRDELLKVLRSVVTGELGEKLRRRVREIAERLKRIRDEEMDIVAEELIQLCRNPNKAK

SEQ ID NO: 402 - protein, 442 aa, Artificial Sequence
  engineered beta-1,2-glycosyltransferase encoded in plasmid pA33101
MATSLQVLMFPWQALGHILPFLNIAKQLADRGFLIYLVNTRINLNSIKKKITYKYLFSIHLIELQLPELPELPSYLHTTNALPPHLNATLHKLLKLSSGTFSRVIENLKVDLLIYDFLLPWAEKVANEQGIPAGRLLTFCAAVFAYFFSFRKNLGVPFLFPAISLPEVAKVKILEALIAEREDLGRLMEQNVNMMLMCTSRTIEAKYIDYCQKLLNWQVVPVGAPFLDLIQLDADNKELMDWLGTKPPNSTVFVSFGSEYFLSKEDMEEIAFALELSNVNFIWVARFPKGEERTLEDALPKGFSERIGERGRVLDKFAPQQRILNHPATGGFISHCGWNSAMEAIDFGVPIIAMPIQNDQPINAKLMVELGVAVEIVRDDDGRIHRGAIAETLKSVVTSETGEILRKNVRELAKLLKSIRDEEMDAVADALIQLCRNLSKSK

SEQ ID NO: 403 - protein, 442 aa, Artificial Sequence
  engineered beta-1,2-glycosyltransferase encoded in plasmid pA33102
GAGNLRVTMFPWQAYGHISPFLSLAKQLADRGFLIELLSTRINLESIKKKIPEKYAFSIHLWELQLPELPELPSHLWTTNGLPPHLNPTLRKALKMAKGNFSRNLSDIRPDLLISDALQPWSEQVALDQGIPAGKLLTSCAAVFSYMVSFRKNPGVEFPFEAISLPEVELVKLREALRKEPEELGRLMEQNKQATLMCTSRTIEAKYIDYCAKLANWQVVPVGPPFQTLITLDASNKELMDWLGTKPPNSTVFVSFGSESFLSKEDMEEVAFALELSNVNFIWVARFPKGEERSLEDALPKGFSERARERGRVVDKFAPQPAILSHPSTGGFISHCGWNSAMESIDFGVPIIAMPQHNDQPINAKLMVELGVAVEVVRDDDGRVHRGAAAEVIRSVVHGPTGEILRAKCRELAKRLKRARDEEMDAVAEELIQLGRNSNKSV

SEQ ID NO: 404 - protein, 442 aa, Artificial Sequence
  engineered beta-1,2-glycosyltransferase encoded in plasmid pA33103
GATNLRVLMFPWLAYGHIGPFLNIAKQLADRGFLIYLCSTRINLNMVIKKITEKYADSIHLIELTLPELPELPPHYHTTNGLPPHLNPTLHKALKLAKPELSRILSTLKPDLLVYDVLAPWAEHVANSQNIPAGKLLTSCAAVFAYMFSFRDNPGVEFPFPAISLPEVEKVKIREILAKLPPELGRLDEGNKQMMLMCTSRLIEAKYIDYCTKLCNWKVVPVGPPFQDLETSDADNKELIRWLGTKHTNSTVFVSFGSEYFLSKEQMEEVAFALELSNVNFIWVARFPKGEEANLEDALPKGFLDRAGERGRVLTGFAPQQRILNHKSTGGFISHCGWNSAMEAIDFGVPIIAMPQTNDQPINAKLMRELGVAVEVSRDDEGKVTRDELAKTLKSVVTGETGEILRANVAEIARALKLIRDEEMDIVAEELRKLCRNSNKTK

SEQ ID NO: 405 - protein, 442 aa, Artificial Sequence
  engineered beta-1,2-glycosyltransferase encoded in plasmid pA33104
MAGSLQVLMFPWQALGHILPFLCIAKQLADRGFLIYLCNTRINLNSLKKKITYKYLDSIHLWELQLPELPELPPHLWTTNALPPHLNKVLHKALKLAAPTFSRIISDLKVDLLIYDVLLPWAEKVANRQNIPAGKLLTSCAAVFAYFVEFRKLPGVEFPFEAIHLPEVELVKIREAVAKERDEGGRLMEQNVNMMLMCTSRTIEAKYIDYCQELCNWQVVPVGPPFLTLIQLDADNKELMDWLGTKPENSTVFVSFGSEYFLSKEDMEEVAFALELSNVNFLWVVRFPKGEERTLIDALPKGFLERIRERGRVLDKFAPQQAILNHPATGGFISHCGWNSAMEAIDFGVPIIAMPIQNDQPINAKLMVELGVAVEIVRDDDGRITREAIAEVLKSVVTSETGEILRANVRELSRLLKLIRDVEMDIVAEELILLCRNSSKSK

SEQ ID NO: 406 - protein, 442 aa, Artificial Sequence
  engineered beta-1,2-glycosyltransferase encoded in plasmid pA33105
MALLLRVLMFPWQALGHILPFLCIAKQLADRGFLIYLLNTMINLNLIKKKITYKYLPSIHLWESPLHLLPELPPYLHTTNALPPHLNKTLHRALKLASGTFSRIISNLKLTLLIYDFLLPWAETVANRQGIPAGRLLTSCAAVFAYFVQFVKLPGHEFPFEAIHLPEVELVKIYEALAREREELFRLMEARTQMMLMCTSRVIEAKYIDYCQKLCNWKVVPVGAPFQDLITNDADNKELIDWLGTKHENSTVFVSFGSEYFLSKEDMEEVAFALELSNVNFIWVARFPKGEERNLEDALPKGFLERIGERGRVLDKFAPQPRILNHPSTGGFISHCGWNSAMESIDFGVPIIAMPIHNDQPINAKLMVELGVAVEIVRDDDGKIHRGEIAETLKSVVTGETGEILRAKVREISKNLKSIRDEEMDAVAEELIQLCRNSNKSK

SEQ ID NO: 407 - protein, 442 aa, Artificial Sequence
  engineered beta-1,2-glycosyltransferase encoded in plasmid pA33106
MATNLRVLMFPWLAYGHISPFLNIAKQLADRGFLIYLCSTRINLESIIKKIPEKYADSIHLIELQLPELPELPPHYHTTNGLPPHLNPTLHKALKMSKPNFSRILQNLKPDLLIYDVLQPWAEHVANEQNIPAGKLLTSCAAVFSYFFSFRKNPGVEFPFPAIHLPEVEKVKIREILAKEPEEGGRLDEGNKQMMLMCTSRTIEAKYIDYCTELCNWKVVPVGPPFQDLFPVDADNKELIDWLGTKHSHSTVFVSFGSEYFLSCEQLEELAWALEVSGVPFIWVVRFPKGAERSLEDALPRGFLERVGERGRVLTGFAPQARVLNHPSTGGFMSHCGWNSAMEAIDAGVPIIAMPILNDQPINAKLMVELGVCVEIVRDDEGSVHRASLAEVLRSVVQGATGEILRKKVREIIKALKSSRDLEMDAVALELIILCRHSNKSK

SEQ ID NO: 408 - protein, 442 aa, Artificial Sequence
  engineered beta-1,2-glycosyltransferase encoded in plasmid pA33107
MAGSLRVLMFPWLAYGHILPFLCIAKQLADRGFLIYLVSTRINLESIKKKIPYKYLFSIHLWELQLPELPELPSHLWTTNALPPHLNPTLHKLLKLASGNFSRILSDLKPDLLIYDFLQPWASKVAERQGIPAGKLLTFCAAVFSYFVSFRKLPGVEFPFEAISLPEVELVKLREAVAREREELGRLMEQNKKMTLMCTSRTIEAKYIDYCQKLCNWKVVPVGAPFLDLITSDADNKELMDWLGTKPPNSTVFVSFGSEYFLSKEDMEEIAFALELSGVNFIWVVRFPKGEERTLIDALPKGFSERIRERGRVLDKFAPQQRILSHPATGGFISHCGWNSAMESIDFGVPIIAMPIHNDQPINAKLMVELGVAVEIVRDDDGRIHRGAIAEVLRSVVTSETGEILRKKVRELAKLLKRIRDEEMDIVADTLIQLCRNLNKSK

SEQ ID NO: 409 - protein, 442 aa, Artificial Sequence
  engineered beta-1,2-glycosyltransferase encoded in plasmid pA33108
MATNLKVLMFPWLALGHILPFLNIAKQLADRGFIIYLLNTRINLESIIKKITNKYLNLIHLITLSLPELPELPPYYHTTNGLPPHLNALLHKALKLSKGEYSRILQNIKPDLLIYDLLQPWAEHVALEQGIPAGRLLTSCAAVFSYFFSWRDNPGEEFPFPAIHLPEKAKVKTQEILAYLREEAFRLMEANVQMMLMCTSRTIEAKYIDYCTDLDNWKVVPVGPPYLDLITNDADNKELIDWLGTKPTHSTVFVSFGSEYFLSKEDMEEVAFALELSNVNFIWVARFPKGEEARLEDALPPGFLDRIGERGRVLDKFAPQLRILNHKSTGGFISHCGWNSAMEAIDFGVPIIAMPIQNDQPINAKLMVELGVAVEIRRDDDGKITRGELLETLKSVVTGELGEKLRRRVREIAKRLKSIRDEEMTAVAETLIQLCRNSNKAK

SEQ ID NO: 410 - protein, 442 aa, Artificial Sequence
  engineered beta-1,2-glycosyltransferase encoded in plasmid pA33109
MAGSLQVLMFPWQALGHILPFLCIAKQLADRGFLIYLLNTRINLNMLKKKITYKYLFLIHLWELQLPELPELPSYLHTTNALPPHLNATLHKLLKLASGTFSRIISDLKVDLLIYDFLLPWAEKVANRQGIPAGKLLTSCAAVFAYFVQFRKLPGVPFPFEAISLPEVELVKILEAVNRERDELGRLMEQNVNMTLMCTSRTIEAKYIDYCQKLCNWQVVPVGAPFQDLITNDADNKELIDWLGTKHENSTVFVSFGSEYFLSKEDMEEVAFALELSNVNFIWVARFPKGEERNLEDALPKGFLERIGERGRVLDKFAPQPRILNHPSTGGFISHCGWNSAMESIDFGVPIIAMPIHNDQPINAKLMVELGVAVEIVRDDDGKIHRGEIAETLKSVVTGETGEILRAKVREISKNLKSIRDEEMDAVAEELIQLCRNSNKSK

SEQ ID NO: 411 - protein, 442 aa, Artificial Sequence
  engineered beta-1,2-glycosyltransferase encoded in plasmid pA33110
GAQSLRVLMFPWLAYGHILPFLSIAKQLADRGFLIYLLSTKINLEMIKKKIPEKYADSIQLIELQLPELPELPPHYHTTNALPPHLNPTLHKALKMAKGNFSRILQNLKPDLLIYDVLQPWASQVANEQNIPSGRLLTSCAAVFSYMFTFRKNPGVEFPFPAIRLPEVELIKIREILAGEPPEAGRLDEQNKQMMLMCTSRLIEAKYIDYCQKLLNWKVVPVGTPFQTLETCDARNKELIDWLGTKHTNSTVFVSFGSEYFLSKEQMEEVAFALVVSNVNFIWVVRFPKGVERLLEDALPNGFLERVRERGRVLTKFAPQLHILNHPSTGGFISHCGWNSAMESIDFGVPIIAMPIHNDQPINAKLMVELGVAVEVVRDDEGKIHRDSLAKVLKSVVTSETREILRAKVAEIAKNLKRIRDEEMDIVAEELIRLCRNSNKSK

SEQ ID NO: 412 - protein, 442 aa, Artificial Sequence
  engineered beta-1,2-glycosyltransferase encoded in plasmid pA33111
MATNLRVLMFPWLAYGHISPFLNIAKQLADRGFLIYLCSTRINLESIIKKIPEKYADSIHLIELQLPELPELPPHYHTTNGLPPHLNPTLHKALKMSKPNFSRILQNLKPDLLIYDVLQPWAEHVANEQNIPAGKLLTSCAAVFSYFFSFRKNPGVEFPFPAIHLPEVEKVKIREILAKEPEEGGRLDEGNKQMMLMCTSRTIEAKYIDYCTELCNWKVVPVGPPFQDMVTNDLDNTELIRWLGTKPENSTVFVSFGSEAFLSKRQMEEIAFALVLSNVNFIWVVRFPKGEERNLIDALPPGFLDRIRERGRVLTKFAPQARILNHRATGGFISHCGWNSAMEAIDFGVPIIAMPILNDQPINAKLMVELGVAVEIRRDDDGLIPREEILKVIKSVMTGELGEILRRNVAELAKRLKRIRDEEMTAVAEELIKLCRNPNKSK

SEQ ID NO: 413 - protein, 442 aa, Artificial Sequence
  engineered beta-1,2-glycosyltransferase encoded in plasmid pA33112
MATNLRVAMFPWQAQGHISPFLNIAKQLADRGFLIYLTNTRINLESIIKKITEKYQRLIHLITLALPHLPELPPHYHTTNGLPPHLNPTLHKALKMSAGEFSRILQNLNPDLLIYDALQPWAEHVANDQGIPAGRLLTSCAAVFSYFFEWRKNLGSEFPFEAIHLPEKEKVKIQEILAYEPEEAGRLDEGNAQYMLMCTSRTIEAKYIDYCTKLCNWKVVPVGPPFQDLTGNDLDNKGLIDWLGTKPPHSTVFVSFGSEAFLSKEDMEEIAFALELSNVNFIWVARFPKGEEANLEDALPPGFLERIRERGRVRPGFAPQPAILNHKSTGGFISHCGWNSAMEAIDFGVPIIAMPITNDQPINAKLMVELGVAVEVRRDDDGKVHRSELAECLKSVVTGETGEKLRRKVREIAKNLKAARDLEMDAVAETLIQLCRNSNKSK

SEQ ID NO: 414 - protein, 442 aa, Artificial Sequence
  engineered beta-1,2-glycosyltransferase encoded in plasmid pA33114
GATNLRVLMFPWQAYGHIGPFLNIAKQMADRGHLIYLTSTRINLESIIKKIPNKYRRLIQLITLALPHLPELPPYYHTTNGLPPHLNPVLHRALKLSKPEVSRIIQNINPDLLIYDALQPWAEHVANEQGVPAGRLATSCAAVFSYMFEWRDNLGSEFLFPAIHLPEVEKVKIQEILAYLPEEAGRLSEGNAQMMLMCTSRTIEAKYIDYCTKLDNWKVVPVGPPFLDLTGNDADNKGLIDWLGTKPPHSTVFVSFGSESFLSKEDMEEIAFALELSNVNFIWVARFPKGEEANLEDALPPGFLDRIGERGRVLDGFAPQPRILNHKSTGGFISHCGWNSAMEAIDFGVPIIAMPITNDQPINAKLMVELGVAVEVRRDDDGKVHRGELAETLKSVVTGETGEKLRRKVREIAKRLKSARDLEMTAVALELIQLCRNSNKAK

SEQ ID NO: 415 - protein, 442 aa, Artificial Sequence
  engineered beta-1,2-glycosyltransferase encoded in plasmid pA33115
MALLLRVLMFPWLAYGHILPFLCIAKQLADRGFLIYLLSTKINLELIKKKIPYKYADSIHLWELQLPLLPELPPHYHTTNALPPHLNPTLHRALKLASGNFSRILSNLKPTLLIYDALQPWAETVANRQGIPAGKLLTSCAAVFSYFVQFRDLPGHEFPFEAIHLPEVELVKIREALARESEELGRLDEANKQMMLMCTSRVIEAKYIDYLQKLCNWQVVPVGAPFLDLITLDADNKELIDWLGTKPPNSTVFVSFGSEYFLSKEDMEEIAFALELSGVNFIWVVRFPKGEERTLEDALPPGFLERVGERGRVLDKFAPQAHILSHPATGGFISHCGWNSAMESIDFGVPIIAMPQHNDQPINAKLMVELGVAVEIVRQDEGKIHREEIAKVLRSVVTGETGEILRAKVREIAKLLKSIRDEEMDAVAEALIRLCRNLNKHN

SEQ ID NO: 416 - protein, 442 aa, Artificial Sequence
  engineered beta-1,2-glycosyltransferase encoded in plasmid pA33116
CADNLRALMFPWLAQGHIGPFLNIAKQLADRGFIIYLCSSKVNLNSAKKKIPNKYADLIHLITLQLPLLPELPPRYHTTNGLPPHLNPTLHKALKLSKPELSRILSTLKPDLLIYDVLAPWASQVANEQNIPGGKLLTSCAAVFAYFFTFRTNPGVPFLFPEIHLPEVEKAKIREALNKEPTEGGRLSEGNKQMMLMCTSRTIEAKYIDYCMELCNWKVVPVGPPFQDLIPSDADNKELIRWLGTKHENSTVFVSFGSEAFLSKEQMEEVAFALELSNVPFIWVARFPKGEERTLEDALPKGFLDRAGERGRVLDGFAPQASCLNHPSTGGFISHCGWNSAMEAIDAGTPIIAMPITNDQPINAKLMVELGVAVEISRDDDGRIHRASIAEVLKSVVSGETGEILRAKVREISEALKSSRDEEMDAVALELMKLGRHSAKSN

SEQ ID NO: 417 - protein, 442 aa, Artificial Sequence
  engineered beta-1,2-glycosyltransferase encoded in plasmid pA33117
GATLLQVLMFPWLAQGHIGPFLCLAKQLADRGFLIYLVSTRINLNLIKKKITYKYQPSIHLWELQLPLLPELPSHYHTTNALPPHLNKVLHKLLKLAAPTVSRIVENLRLTLLIYDFLQPWAETVALRQGIPAGRLLTSCAAVFAYMWQVNKLLGVEFLFEAINLPELELVKIYEALNRESEEAFRLVVANVNIMLMCTSRVIEAKYIDYLMKLCNWKVVPVGAPFQDLITNDADNKELIDWLGTKHENSTVFVSFGSEYFLSKEDMEEVAFALELSNVNFIWVARFPKGEERNLEDALPKGFLERIGERGRVLDKFAPQPRILNHPSTGGFISHCGWNSAMESIDFGVPIIAMPIHNDQPINAKLMVELGVAVEIVRDDDGKIHRGEIAETLKSVVTGETGEILRAKVREISKNLKSIRDEEMDAVAEELIQLCRNSNKSK

SEQ ID NO: 418 - protein, 442 aa, Artificial Sequence
  engineered beta-1,2-glycosyltransferase encoded in plasmid pA33118
MATNLRVLMFPWLAYGHISPFLNIAKQLADRGFLIYLCSTRINLESIIKKIPEKYADSIHLIELQLPELPELPPHYHTTNGLPPHLNPTLHKALKMSKPNFSRILQNLKPDLLIYDVLQPWAEHVANEQNIPAGKLLTSCAAVFSYFFSFRKNPGVEFPFPAIHLPEVEKVKIREILAKEPEEGGRLDEGNKQMMLMCTSRTIEAKYIDYCTELCNWKVVPVGPPFQTLIYNDARNTELIDWLGTKPENSTVFVSFGSEYFLSKEDMEELAWALVLSSVNFIWVVRFPKGEEARLIDALPPGFLDRIRERGRVLPKFAPQQRILNHKATGGFISHCGWNSAMEAIDFGVPIIAMPITNDQPINAKLMVELGVAVEIRRDDDGRIPREEIVKVLRSVVTGETGERLRARVAEIAERLKRIRDVEMTIVALELILLCRNSNKSV

SEQ ID NO: 419 - protein, 442 aa, Artificial Sequence
  engineered beta-1,2-glycosyltransferase encoded in plasmid pA33119
MATNLRVLMFPWLAYGHISPFLNIAKQLADRGFLIYLCSTRINLESIIKKIPEKYADSIHLIELQLPELPELPPHYHTTNGLPPHLNPTLHKALKMSKPNFSRILQNLKPDLLIYDVLQPWAEHVANEQNIPAGKLLTSCAAVFSYFFSFRKNPGVEFPFPAIHLPEVEKVKIREILAKEPEEGGRLDEGNKQMMLMCTSRTIEAKYIDYCTELCNWKVVPVGPPFQDLIFNDASNKELTRWLGTKPPNSTVFVSFGSEYFLSKEQMEEVAFALELSGSNFIWVARFPKGEERTLEDALPPGFLERVGERGRVLDRFAPQPRILSHPATGGVISHCGWNSAMEAIDFGTPIIAMPQHNDQPINAKLMMELGVAVEVARRDLGKIHREELAQTLRSVVTGELGEKLRANCRELAKLLKSSRDEEMDAVAEALMKLCRHSNKTK

SEQ ID NO: 420 - protein, 442 aa, Artificial Sequence
  engineered beta-1,2-glycosyltransferase encoded in plasmid pA33120
GATSQRVLMFPWQAEGHISPFLNLAKQLADRGFLIYVCNTRINLESIKKKITEKYAFSIHLIELTLPELPELPSHLHTTNGLPPHLNATLHKALKMSKGNFSRQSENIRADLLISDVLQPWSEQVANEQGVPAGKLLTSCAAVFAYMFSFRKNPGVEFPFPAISLPEVEKVKLYEALNRLPEELGRLMEANAQMMLMCTSRTIEAKYIDYCAKLANWQVVPVGPPFQDLIMNDASNKELMDWLGTKPPNSTVFVSFGSEYFLSKEDMEEVAFALELSGSNFIWVARFPKGEERSLEDALPKGFSERAGERGRVVDKFAPQPRILSHPSTGGFISHCGWNSAMEAIDFGVPIIAMPQHNDQPINAKLMVELGVAVEVVRDDDGRIHRGEAAETIRSVVTGPTGEILRANCRELARRLKSARDVEMDAVAEELRALCRNSSKSK

SEQ ID NO: 421 - protein, 442 aa, Artificial Sequence
  engineered beta-1,2-glycosyltransferase encoded in plasmid pA33122
LADNLRVLMFPWLALGHILPFLNIAKQLADRGFIIYLCSTKINLEMIKKKITYAYADLIILITLQLPLLPELPPHYHTTNALPPHLNKVLHKALKLSAPEFSRILRNLKPDLLIYDVLAPWASQVANEQNIPAGRLLTSCAAVFAYFVSFVTNPGVEFLFPEIHLPEVEKVKIIEALIKLPTEGGRLDEGNVQMMLMCTSRTIEAKYIDYCMELCNWKVVPVGPPFQLMIPVDADNKELIDWLGTKHEHSTVFVSFGSEYFLSCEQLEEVAFALELSNVPFIWVVRFPKGEERSLEDALPKGFLDRVRERGRVLDGFAPQARVLNHPSTGGVISHCGWNSAMEAIDAGVPIIAMPILNDQPINAKLMVELGVCVEIVRDDEGKIHRASIAEVLKSVVQGETGEILRAKVAEISRALKSSRDLEMDAVALELIKLCRNSNKSK

SEQ ID NO: 422 - protein, 442 aa, Artificial Sequence
  engineered beta-1,2-glycosyltransferase encoded in plasmid pA33123
GAPILRVLMFPWLAYGHILPFLSIAKQLADRGFIIYLLSTKVMLELVIKKIPYKYLRLIHLWTLSLPLLPELPPYLHTTNGLPPHLNAVLHKLLQMAAPEFSRVISTLNITLLIYDVLAPWAEHIAESQGIPAGKLLTSCAAVFAYMVEVNKNPGEEFPFPEINLPELELDKTREILATLPEDAGRLSEGNVQIMLMCTSRLIEATYIDYLSDLDNWKVVPVGTPFQDLITNDADNKELIDWLGTKHENSTVFVSFGSEYFLSKEDMEEVAFALELSNVNFIWVARFPKGEERNLEDALPKGFLERIGERGRVLDKFAPQPRILNHPSTGGFISHCGWNSAMESIDFGVPIIAMPIHNDQPINAKLMVELGVAVEIVRDDDGKIHRGEIAETLKSVVTGETGEILRAKVREISKNLKSIRDEEMDAVAEELIQLCRNSNKSK

SEQ ID NO: 423 - protein, 442 aa, Artificial Sequence
  engineered beta-1,2-glycosyltransferase encoded in plasmid pA33124
LAQNLRVTMFPWQAYGHIGPFLNIAKQLADRGFLIYLLSSQINLESAKKKIPEKYAPSIHLWELQLPELPELPPHYHTTNALPPHLNPTLRKALKMASGNFGRILSNLKPTLLISDALQPWSEKVANGQGIPAGKLLTSCAAVFSYFWSFRTNPGNEFPFEAISLPEVAKVKHREALARESEELGRLMEANKQMMLMCTSREIEAKYIDYCAKLANWQVVPVGAPFQDLITNDASNKELTRWLGTKPPNSTVFVSFGSEYFLSKEQMEEVAFALELSGVNFIWVARFPKGEERTLEDALPPGFLERVGERGRVLDKFAPQPRILSHPATGGVISHCGWNSAMESIDFGTPIIAMPQHNDQPINAKLMMELGVAVEVVRRDLGKIHREEAARVLRSVVTGETGEKLRAKSREIAKRLKRSRDEEMDAVAEALIQLCRHSNKTK

SEQ ID NO: 424 - protein, 442 aa, Artificial Sequence
  engineered beta-1,2-glycosyltransferase encoded in plasmid pA33125
GAPLQRVLMFPWLALGHISPFLRLARQLADRGFLIYLVSTRVNLESIKKKIPEKYANSIHLIESTLPHLPELPPHLHTTNGLPPHLNPVLHKALKLSKPNLSRVLQNLNPTLLLSDALQPWSSQVANSQNIPAGRSLTSCAAVYAYMVTHRKNPGQEFPFPAIHLPERAKRKTREALRTEPEEAGRLSEGNKNAMLMCTSRTIEAKYIDYCTELDNWKVVPVGPPFQDLITNDADNKELIDWLGTKHENSTVFVSFGSEYFLSKEDMEEVAFALELSNVNFIWVARFPKGEERNLEDALPKGFLERIGERGRVLDKFAPQPRILNHPSTGGFISHCGWNSAMESIDFGVPIIAMPIHNDQPINAKLMVELGVAVEIVRDDDGKIHRGEIAETLKSVVTGETGEILRAKVREISKNLKSIRDEEMDAVAEELIQLCRNSNKSK

SEQ ID NO: 425 - protein, 442 aa, Artificial Sequence
  engineered beta-1,2-glycosyltransferase encoded in plasmid pA33129
MAQNLRVLMFPWLAYGHILPFLCIAKQLADRGFLIYLLSTRINLESIIKKIPNKYVQSIQLITLQLPLLPELPPHYWTTNGLPPHLNPLLHRALKLSKGNYSFILQTIRPDLLIYDLLQPWAEHVANEQGIPAGRLLTSCAAVFSYMFSFRDRLGLEFPFEAINLPEVEKVKLREILATESEEAGRLSEGNKQMMLMCTSRTIEAKYIDYCTDLDNWKVVPVGPPFLLLITNDLDNKELIDWLGTKPENSTVFVSFGSEYFLSKEDMEEVAFALVLSNVNFIWVARFPKGEERLLIDALPPGFLERIRERGRVLDKFAPQLRILNHPSTGGFISHCGWNSAMESIDFGVPIIAMPIHNDQPINAKLMVELGVAVEIVRDDEGKIHRSELAEVLKSVVMGETGEILRRKVRELAKRLKSIRDEEMTIVALELIKLCRNPNKAK

SEQ ID NO: 426 - protein, 442 aa, Artificial Sequence
  engineered beta-1,2-glycosyltransferase encoded in plasmid pA33130
MADNLRVLMFPWLAYGHISPFLNIAKQLADRGFIIYLCSTKVNLNSIKKKITEKYANLIHLITYQLPLLPELPPRYHTTNGLPPALNMTLRKALQMSKPEFSRTLQNLKPDLLIADALAPWAEQVANEQNIPQGKLLTSCAAVFAYFFSFRKNPGLPFPFPEIRLPEVEKAKIREILAREPTEGGRLDEGGKQMMLMCTSRTIEAKYIDYCMKLCNWKVVPVGAPFQDLFPNDADNKELIRWLGTKHSNSTVFVSFGSEAFLSKEQMEELAFALELSGVNFIWVARFPKGEERNLEDALPNGFTDRIGERGRVVTGFAPQPSCLNHPSTGGFMSHCGWNSAMEAIDFGTPIIAMPITNDQPINAKLMVELGVAVEVRRDDDGRVTRASLAEVLRSVVSGETGEILRRKVREIIANLKSSRDEEMDAVALELMQLGRKSAKSN

SEQ ID NO: 427 - protein, 442 aa, Artificial Sequence
  engineered beta-1,2-glycosyltransferase encoded in plasmid pA33131
GATLLRVLMFPWLALGHISPFLRIAKQLADRGFLIYLCSTRVNLESIKKKIPEKYADSIHLWELTLPHLPELPPHLHTTNGLPPHLNPVLHKALKLSRPNLSRILQNLKPTLLISDVLQPWSSSVANEQNIPAGRLLTSCAAVFAYMFTFRKNPGVEFPFPAIHLPERALRKIYEALRKEPEEGGRLSEGNKNAMLMCTSRTIEAKYIDYCTELDNWKVVPVGPPYQTVIANDLDNKELMRWLGTKPEHSTVFVSFGSEYFLSKEDMEEVAFALELSNVNFIWVARFPKGEEARLEDALPPGFLDRIRERGRVLDRFAPQPRILNHKATGGFISHCGWNSAMEAIDFGVPIIAMPITNDQPINAKLMRELGVAVEIRRDDEGKIPREEIAKTLKSVVTGETGEKLRANCREISERLKRARDVEMDAVALELIKLGRNSNKSK

SEQ ID NO: 428 - protein, 442 aa, Artificial Sequence
  engineered beta-1,2-glycosyltransferase encoded in plasmid pA33132
GAPLLRVLMFPWLAYGHILPFLNIARQLADRGFLIYLLSTAVNLESVIHKIPEKYVRSIHLITLQLPELPELPPHLHTTNGLPPHLNPVLHKALKLAKGNFSFILQTLNPTLLIYDVLQPWASQVAESQNIPQGRLLTSCAAVFSYMVTHRTLLGNEFPFPEIHLPEVAKDKTREILAKESEEAGRLSEANKNMMLMCTSRTIEAKYIDYCTDLDNWKVVPVGPPFMTLITNDASNTELIDWLGTKPPNSTVFVSFGSEYFLSKEDMEELAFALVLSSVNFIWVVRFPKGEERRLIDALPPGFLERIRERGRVLDKFAPQQRILNHPATGGFISHCGWNSAMESIDFGVPIIAMPIHNDQPINAKLMVELGVAVEIVRDDEGKIHRHEIAEVLKSVVTGETGEKLRAKVAEIAKRLKLIRDEEMTAVALELILLCRNSNKSK

SEQ ID NO: 429 - protein, 442 aa, Artificial Sequence
  engineered beta-1,2-glycosyltransferase encoded in plasmid pA33133
MATNLRVLMFPWLAYGHISPFLNIAKQLADRGFLIYLCSTRINLESIIKKIPEKYADSIHLIELQLPELPELPPHYHTTNGLPPHLNPTLHKALKMSKPNFSRILQNLKPDLLIYDVLQPWAEHVANEQNIPAGKLLTSCAAVFSYFFSFRKNPGVEFPFPAIHLPEVEKVKIREILAKEPEEGGRLDEGNKQMMLMCTSRTIEAKYIDYCTELCNWKVVPVGPPFQDLTQSDADNKELIRWLGTKHSNSTVFVSFGSEAFLSKEQMEELAFALELSGVPFIWVARFPKGEERTLEDALPNGFTDRAGERGRVLTGFAPQASCLNHPSTGGFMSHCGWNSAMEAIDAGTPIIAMPITNDQPINAKLMVELGVAVEVSRDDDGRVTRASLAEVLRSVVSGETGEILRRKVREIAEALKSSRDEEMDAVALELMKLGRHSAKSN

SEQ ID NO: 430 - protein, 442 aa, Artificial Sequence
  engineered beta-1,2-glycosyltransferase encoded in plasmid pA33134
GAPNQRVLMFPWLALGHISPFLRIARQLADRGFLIYLVSTRINLESIIKKIPEKYANSIHLIESTLPELPELPPHLHTTNGLPPHLNPVLHKALKLSKPNLSRVLQNLNPTLLIYDALQPWASHVAEEQNIPAGKLLTSCAAVFAYMFSHRKNPGNEFPFPAIRLPERAKVKLREILATEPEEAGRLSEGNKNAMLMCTSRTIEAKYIDYLTELDNWKVVPVGPPYQTLAPNDLDNKELMHWLGTKHEHSTVFVSFGSEYFLSKEDMEEVAFALELSSVNFIWVARFPKGEEARLEDALPKGFLDRIRERGRVLDRFAPQPRILNHKATGGFISHCGWNSAMEAIDFGVPIIAMPQHNDQPINAKLMRELGVAVEVRRDDEGKIPRDEIAETLRSVVTGETGEILRANCREIAERLKRIRDVEMDAVAEELIKLGRNSNKSK

SEQ ID NO: 431 - protein, 442 aa, Artificial Sequence
  engineered beta-1,2-glycosyltransferase encoded in plasmid pA33135
MATSLRVLMFPWLAYGHISPFLNIAKQLADRGFLIYLCSTQINLESIKKKITEKYADSIHLIELTLPELPELPPHYHTTNALPPHLNPTLHKALKMAKPEFSRISQDLKPDLLVADVLAPWAEQSANEQNIPSGRLLTSCAAVFAYFWQFRKNPGVPFPFPAIHLPEVEKRKIREILAKLPPELGRLDEQNKQMMLMCTSRLIEAKYIDYCAKFCNWKVVPVGPPFQDLEMNDAGNKELIRWLGTKHTNSTVFVSFGSEYFLSKEQMEEVAFALELSNVNFIWVARFPKGEEANLEDALPKGFLDRIGERGRVLTGFAPQPHVLNHKSTGGFISHCGWNSAMEAIDFGTPIIAMPQTNDQPINAKLMRELGVAVEVSRDDEGKVTRDALAETLRSVVTGETGESLRANVAELARNLKRSRDEEMDIVAEELRQLCRKSNKSK

SEQ ID NO: 432 - protein, 442 aa, Artificial Sequence
  engineered beta-1,2-glycosyltransferase encoded in plasmid pA33136
GATLLRVLMFPWLALGHISPFLNIARQLADRGFLIYLVSTRVNLESIKKKIPEKYANSIHLIESTLPHLPELPPHLHTTNGLPPHLNPVLHKALKLSKPNLSRVLQNLNPTLLIADALQPWAERVAEEQNIPAGRGLTSCAAVFAYMFTHRKNPGQEFPFPAIHLPERAKRKTLEALRREPEEAGRLSEGNKNMMLMCTSRTIEAKYIDYCTELDNWKVVPVGPPYQDALANDADNKELMDWLGTKPEHSTVFVSFGSEAFLSKEDMEEVAFALELSNVNFIWVARFPKGEEARLEDALPPGFLDRIGERGRVLDRFAPQPRILNHKATGGFISHCGWNSAMEAIDFGVPIIAMPQTNDQPINAKLMVELGVAVEVRRDDDGKIHRGEIARTLKSVVTGETGERLRANCREIAKRLKSARDVEMDAVALELIKLCRNSNKSK

SEQ ID NO: 433 - protein, 442 aa, Artificial Sequence
  engineered beta-1,2-glycosyltransferase encoded in plasmid pA33137
GATSLRVLMFPWLAYGHIGPFLNIAKQLADRGFLIYLCSTQINLEMIKKKITEKYADSIHLIELTLPELPELPPHYHTTNALPPHLNPTLHKALKLARPELSRILSTLRPDLLVYDVLAPWAEQVAESQKIPAGKLLTSCAAVFAYMFQFRKNPGVPFPFPAIHLPEVEKRKIREAMAKLPPELGRLDEQNKQMTLMCTSRLIEAKYIDYCQKLCNWKVVPVGPPFQDLITNDADNKELIDWLGTKHENSTVFVSFGSEYFLSKEDMEEVAFALELSNVNFIWVARFPKGEERNLEDALPKGFLERIGERGRVLDKFAPQPRILNHPSTGGFISHCGWNSAMESIDFGVPIIAMPIHNDQPINAKLMVELGVAVEIVRDDDGKIHRGEIAETLKSVVTGETGEILRAKVREISKNLKSIRDEEMDAVAEELIQLCRNSNKSK

SEQ ID NO: 434 - protein, 442 aa, Artificial Sequence
  engineered beta-1,2-glycosyltransferase encoded in plasmid pA33138
GATSLTVLMFPWLALGHILPFLNIAKQLADRGFIIYLLSTRINLELIKKKITEKYADLIILIELTLPELPELPPHYHTTNALPPHLNMTLHKALKMSAPEFSRILQNLKADLLIYDVLAPWAEKVAEEQKIPAGKLLTSCAAVFAYMFQWRKNPGVEFPFPAIRLPEVAKVKIIEILIKLPEELGRLDEQNVQMMLMCTSRLIEAKYIDYCQKLLNWKVVPVGTPYQDLEQCDARNKELIDWLGTKHTNSTVFVSFGSEYFLSKEDMEEVAFALEVSNVNFIWVVRFPKGVEALLEDALPNGFLDRIGERGRVLTGFAPQLRILNHKSTGGFISHCGWNSAMEAIDFGVPIIAMPILNDQPINAKLMVELGVAVEVVRDDDGKITRGELVKTLKSVVTSETREILRAKVREIAVALKSIRDLEMDAVALELIKLCRNSNKSK

SEQ ID NO: 435 - protein, 442 aa, Artificial Sequence
  engineered beta-1,2-glycosyltransferase encoded in plasmid pA33139
MATNLRVLMFPWLAYGHISPFLNIAKQLADRGFLIYLCSTRINLESIIKKIPEKYADSIHLIELQLPELPELPPHYHTTNGLPPHLNPTLHKALKMSKPNFSRILQNLKPDLLIYDVLQPWAEHVANEQNIPAGKLLTSCAAVFSYFFSFRKNPGVEFPFPAIHLPEVEKVKIREILAKEPEEGGRLDEGNKQMMLMCTSRTIEAKYIDYCTELCNWKVVPVGPPFLDLEMSDASNKELIDWLGTKPPNSTVFVSFGSEYFLSKEDMEEIAFALELSGVNFIWVVRFPKGEERTLEDALPPGFLERVGERGRVLDRFAPQAHILSHPATGGFISHCGWNSAMEAIDFGVPIIAMPQHNDQPINAKLMVELGVAVEIVRQDEGKIHREEIAKVLRSVVTGELGEILRKNVREIAEALKSIRDVEMDAVAEALIRLCRNRNKTK

SEQ ID NO: 436 - protein, 442 aa, Artificial Sequence
  engineered beta-1,2-glycosyltransferase encoded in plasmid pA33140
MALNLRVLMFPWLALGHILPFLCIAKQLADRGFLIYLLSTKINLESIIKKITYKYADSIHLWESPLHELPELPPYLHTTNGLPPHLNKTLHKALKLAKGNFSRILSNLKLTLLIYDVLLPWAEHVANEQGIPAGKLLTSCAAVFAYFFSFVKLPGHEFPFEAINLPEVELVKIYEALAREREELFRLVHGNVQMMLMCTSRVIEAKYIDYLTKLCNWKVVPVGAPFLDLIQVDADNKELIRWLGTKHTNSTVFVSFGSEYFLSKEDMEEIAFALELSGVNFIWVARFPKGEERTLEDALPKGFLERVGERGRVLDRFAPQAHILSHPATGGFISHCGWNSAMEAIDFGVPIIAMPQHNDQPINAKLMVELGVAVEIVRQDDGKIHREEIAKVLRSVVTGELGEILRKNVREIAELLKSIRDVEMDAVAEALIILCRNRNKTN

SEQ ID NO: 437 - protein, 442 aa, Artificial Sequence
  engineered beta-1,2-glycosyltransferase encoded in plasmid pA33141
MATNLRVLMFPWLAYGHISPFLNIAKQLADRGFLIYLCSTRINLESIIKKIPEKYADSIHLIELQLPELPELPPHYHTTNGLPPHLNPTLHKALKMSKPNFSRILQNLKPDLLIYDVLQPWAEHVANEQNIPAGKLLTSCAAVFSYFFSFRKNPGVEFPFPAIHLPEVEKVKIREILAKEPEEGGRLDEGNKQMMLMCTSRTIEAKYIDYCTELCNWKVVPVGPPFQTMSTEDADNKGLMDWLGTKPPNSTVFVSFGSEYFLSKEQMEEVAFALELSNVNFIWVARFPKGEERTLEDALPPGFSERVGERGRVLDKFAPQPRVLSHKSTGGFISHCGWNSAMEAIDFGVPIIAMPQLNDQPINAKLMRELGVGVEVVRDDDGKIPRGEIARTVKSVVTSPTGEKLRANSRELAKRLKLARDLEMGAVAEELIRLCRNSNKSK

SEQ ID NO: 438 - protein, 442 aa, Artificial Sequence
  engineered beta-1,2-glycosyltransferase encoded in plasmid pA33142
GATNLRVAMFPWLAQGHIGPFLSIAKQMADRGFLIYLCSTRINLESIIKKITEKYARLIQLIELALPELPELPPYYHTTNGLPPHLNPVLHKALKLSKPEVSRILQNLNPDLLVYDALQPWAEHVANEQGIPAGKLATSCAAVFSYMVSFRDRPGEEFPFEAIHLPEKEKVKIQEIVAYEPEEAGRLSEGNAQYMLMCTSRTIEAKYIDYCTELDNWKVVPVGPPFLDLTGNDLDNKGLMDWLGTKHEHSTVFVSFGSEYFLSKEDMEEIAFALELSNVNFIWVARFPKGLEARLEDALPKGFLERIRERGRVLDGFAPQPAILNHKSTGGFISHCGWNSAMEAIDFGVPIIAMPITNDQPINAKLMVELGVAVEVRRDDDGKVHRSELARCLKSVVTGELGEILRRKVREIAKLLKAIRDLEMDAVAEELIQLCRNSNKAK

SEQ ID NO: 439 - protein, 442 aa, Artificial Sequence
  engineered beta-1,2-glycosyltransferase encoded in plasmid pA33143
MATNLRVLMFPWLAYGHISPFLNIAKQLADRGFLIYLCSTRINLESIIKKIPEKYADSIHLIELQLPELPELPPHYHTTNGLPPHLNPTLHKALKMSKPNFSRILQNLKPDLLIYDVLQPWAEHVANEQNIPAGKLLTSCAAVFSYFFSFRKNPGVEFPFPAIHLPEVEKVKIREILAKEPEEGGRLDEGNKQMMLMCTSRTIEAKYIDYCTELCNWKVVPVGPPFQDLEQCDARNKELIDWLGTKHTNSTVFVSFGSEYFLSKEQMEEVAFALVVSNVNFIWVVRFPKGVEALLIDALPNGFLDRIRERGRVLTGFAPQQHILNHKSTGGFISHCGWNSAMEAIDFGVPIIAMPILNDQPINAKLMVELGVAVEVRRDDEGKITRDELVKVLKSVVTSETREILRAKVAEIAKLLKSIRDLEMDIVAEELLKLCRNLNKSK

SEQ ID NO: 440 - protein, 442 aa, Artificial Sequence
  engineered beta-1,2-glycosyltransferase encoded in plasmid pA33144
MATNLKVLMFPWLALGHILPFLSIAKQLADRGFIIYLLNTRINLESIIKKITNKYLNLIHLITLSLPELPELPPYYWTTNGLPPHLNALLHKALKLAKGEYSRILQDIKPDLLIYDLLQPWASHVANEQGIPAGRLLTSCAAVFSYMFSFRDRLGEEFPFEAIHLPEKAKVKTQEIVAYESEEAGRLSEFNVQMMLMCTSRTIEAKYIDYCTDLDNWKVVPVGPPFQDLITNDADNKELIDWLGTKHENSTVFVSFGSEYFLSKEDMEEVAFALELSNVNFIWVARFPKGEERNLEDALPKGFLERIGERGRVLDKFAPQPRILNHPSTGGFISHCGWNSAMESIDFGVPIIAMPIHNDQPINAKLMVELGVAVEIVRDDDGKIHRGEIAETLKSVVTGETGEILRAKVREISKNLKSIRDEEMDAVAEELIQLCRNSNKSK

SEQ ID NO: 441 - protein, 442 aa, Artificial Sequence
  engineered beta-1,2-glycosyltransferase encoded in plasmid pA33145
GATLLRVLMFPWLAYGHILPFLNIARQLADRGFLIYLLSTRINLNSIIKKITEKYVQLIHLITLSLPELPELPPYLHTTNGLPPHLNAVLHKALKMSKGELSRILENLNVTLLIVDVLLPWAEQVAEEQNIPAGKSLTSCAAVFAYFFTWNKNPGNEFPFPEIHLPELEKDKTREILRRVSEELGRLSEGNKNMMLMCTSRTIEAKYIDYCTDLDNWKVVPVGPPYMDLIYNDARNTELIDWLGTKPPNSTVFVSFGSEYFLSKEDMEELAFALELSSVNFIWVVRFPKGEEARLEDALPPGFLDRIGERGRVLDKFAPQQRILHHKATGGFISHCGWNSAMEAIDFGVPIIAMPITNDQPINAKLMVELGVAVEIRRDDDGKIPRGEIVKTLRSVVTGELGEILRRNVREIAKRLKSIRDVEMTAVAEELIQLCRRSNKSK

SEQ ID NO: 442 - protein, 442 aa, Artificial Sequence
  engineered beta-1,2-glycosyltransferase encoded in plasmid pA33146
MATNLRVLMFPWLAYGHISPFLNIAKQLADRGFLIYLCSTRINLESIIKKIPEKYADSIHLIELQLPELPELPPHYHTTNGLPPHLNPTLHKALKMSKPNFSRILQNLKPDLLIYDVLQPWAEHVANEQNIPAGKLLTSCAAVFSYFFSFRKNPGVEFPFPAIHLPEVEKVKIREILAKEPEEGGRLDEGNKQMMLMCTSRTIEAKYIDYCTELCNWKVVPVGPPFLDLTGNDLDNKGLMDWLGTKPPHSTVFVSFGSESFLSKRDMEEIAFALELSNVNFIWVARFPKGEEANLEDALPPGFLERIRERGRVVDGFAPQPAILNHKSTGGFISHCGWNSAMEAIDFGVPIIAMPITNDQPINAKLMVELGVAVEVRRDDDGKVHRSELAECLKSVVTGELGEKLRRKVREIAKRLKASRDLEMGAVAEALIQLCRNSNKAK

SEQ ID NO: 443 - protein, 442 aa, Artificial Sequence
  engineered beta-1,2-glycosyltransferase encoded in plasmid pA33147
MADNLRVLMFPWLAYGHISPFLNIAKQLADRGFIIYLVSTKINLESIKHKITEAYADLIHLITVQLPLLPELPPHYHTTNALPPALNMTLHKALKMSAPEFSRILQNLKPDLLIYDLLAPWASQIANEQNIPAGKLLTSCAAVFAYFFSFVKNPGLPFPFPEIRLPEVEKAKIIEILIKEPTEGGRLDEGQKQMMLMCTSRTIEAKYIDYCMKLCNWKVVPVGTPFQDLFPNDADNKELIRWLGTKHSHSTVFVSFGSEYFLSHEQMEEIAWALEVSGVNFIWVVRFPKGAERNLEDALPRGFLERIGERGRVLTGFAPQPSVLNHPSTGGFMSHCGWNSAMEAIDFGVPIIAMPILNDQPINAKLMVELGVCVEIVRDDEGSVHRASLAEVLRSVVQGALGEILRKKVREIILNLKSSRDLEMDAVAEELIQLCRNSNKSK

SEQ ID NO: 444 - protein, 442 aa, Artificial Sequence
  engineered beta-1,2-glycosyltransferase encoded in plasmid pA33148
GATNLRVLMFPWLAYGHIGPFLNIAKQLADRGFLIYLCSTAINLEMIKKKIPEKYADSIHLIELQLPELPELPPHYHTTNALPPHLNPTLHKALKLARPNLSRILQDLKPDLLVYDVLQPWAEQVANSQNIPAGGLLTSCAAVFSYMWQFRDNPGVEFPFPAIHLPEVEKRKIREIMAKEPPELGRLDEQNKQMTLMCTSRLIEAKYIDYCAKLCNWKVVPVGPPFQDLLTSDARNKELIDWLGTKHTNSTVFVSFGSEYFLSKEQMEEVAFALELSNVNFIWVARFPKGEERNLEDALPKGFLERAGERGRVLTKFAPQQAVLNHPSTGGFISHCGWNSAMESIDAGTPIIAMPQHNDQPINAKLMRELGVAVEVVRDDEGKVHRDSLAKTLKSVVTGETGESLRAKVAELAKNLKRSRDEEMTIVALELIKLCRNSNKTK

SEQ ID NO: 445 - protein, 442 aa, Artificial Sequence
  engineered beta-1,2-glycosyltransferase encoded in plasmid pA33149
GATNLRVAMFPWQAYGHIGPFLSIAKQMADRGFLIYLTSTQINLESIIKKITNKYQRLIQLITLALPHLPELPPYYHTTNGLPPHLNPTLHRALKLSKPEYSRRLQNLNPDLLVYDALQPWAEHVANEQGIPAGRLATSCAAVFSYMFEFRDRLGSEFPFEAIHLPEKEKVKILEIVAYEPEEAGRLSEGNAQYMLMCTSRTIEAKYIDYCTKLDNWKVVPVGPPFQDLITNDADNKELIDWLGTKHENSTVFVSFGSEYFLSKEDMEEVAFALELSNVNFIWVARFPKGEERNLEDALPKGFLERIGERGRVLDKFAPQPRILNHPSTGGFISHCGWNSAMESIDFGVPIIAMPIHNDQPINAKLMVELGVAVEIVRDDDGKIHRGEIAETLKSVVTGETGEILRAKVREISKNLKSIRDEEMDAVAEELIQLCRNSNKSK

SEQ ID NO: 446 - protein, 442 aa, Artificial Sequence
  engineered beta-1,2-glycosyltransferase encoded in plasmid pA33150
MATLLRVLMFPWLALGHISPFLNLAKQLADRGFLIYLVSTRVNLESIKKKIPEKYANSIHLWESTLPELPELPPHYHTTNGLPPHLNATLHKALKMSKPNFSRVLQNLNPDLLLNDALQPWAEQVANEQNIPAGRSLTSCAAVFAYFFTHRKNPGNEFPFPAIRLPERELRKTREILRTLPEEAGRLDEGNKQAMLMCTSRTIEAKYIDYLTELCNWKVVPVGPPYQTVAPNDLDNKELIRWLGTKPEHSTVFVSFGSEAFLSKEDMEEVAFALELSNVNFIWVARFPKGEEANLEDALPPGFLDRIRERGRVLDRFAPQPRILNHKSTGGFISHCGWNSAMEAIDFGVPIIAMPQTNDQPINAKLMRELGVAVEVRRDDEGKIPRDEIAETLKSVVTGETGERLRRNVREIAENLKRARDVEMDAVAEELIQLGRNSNKSK

SEQ ID NO: 447 - protein, 442 aa, Artificial Sequence
  engineered beta-1,2-glycosyltransferase encoded in plasmid pA33151
GATNLRVAMFPWQAQGHIGPFLSIAKQMADRGFLIYLCSTQINLESIIKKITNKYQDLIQLITLALPHLPELPPYYHTTNGLPPHLNPVLHRALKLSKPEYSRILQNIKPDLLVYDVLQPWAEHVANEQNIPAGRLATSCAAVFSYMFSFRDRLGVEFPFEAIHLPEKEKVKIVEIMRKEPEEGGRLSEGNAQYMLMCTSRTIEAKYIDYCTELDNWKVVPVGPPFLLLIGNDLDNKGLMDWLGTKPEHSTVFVSFGSEAFLSKEDMEEVAFALELSNVNFIWVARFPKGEEANLEDALPPGFLERIRERGRVVDGFAPQPAILNHRSTGGFISHCGWNSAMEAIDFGVPIIAMPITNDQPINAKLMVELGVAVEIRRRDDGKIHRSEIARCLKSVVTGETGEKLRAKVREISKRLKASRDLEMGAVAEELIQLCRNSNKAK

SEQ ID NO: 448 - protein, 442 aa, Artificial Sequence
  engineered beta-1,2-glycosyltransferase encoded in plasmid pA33152
GATNLTVLMFPWLALGHILPFLNIAKQLADRGFLIYLLSTKINLELIIKKITEKYASLIQLIELTLPELPELPPHYHTTNGLPPHLNKVLHKALKMAKGEFSRILQNLRADLLIYDVLAPWAEHVAESQKIPAGKLLTSCAAVFAYMFSWRDLPGVEFLFPAIRLPEVALVKIIEILAGEPPELGRLDEGNVQMMLMCTSRLIEAKYIDYCTKLLNWKVVPVGTPYQTLEMLDADNKELIDWLGTKHTNSTVFVSFGSEYFLSKEQMEEVAFALVLSNVNFIWVARFPKGVEALLIDALPKGFLDRIRERGRVLTGFAPQLHILNHKSTGGFISHCGWNSAMEAIDFGVPIIAMPILNDQPINAKLMVELGVAVEIRRDDEGKITRDELVRVLKSVVTGETREILRAKVAEIAKLLKSIRDLEMTIVAEELIKLCRNSNKSK

SEQ ID NO: 449 - protein, 442 aa, Artificial Sequence
  engineered beta-1,2-glycosyltransferase encoded in plasmid pA33153
LADNLRVLMFPWLALGHILPFLNIAKQLADRGFIIYLLSTKINLEMIKKKITYAYADLIILITLQLPLLPELPPHYHTTNALPPALNKVLHKALKLSAPEVSRILSNLKPDLLIYDLLAPWASQLANEQNIPAGRLLTSCAAVFAYFVSFVTNPGLPFLFPEIHLPEVEKAKILEALIKLPTEGGRLDVGQVQMMLMCTSRTIEAKYIDYCMKLCNWKVVPVGTPFQDLITNDADNKELIDWLGTKHENSTVFVSFGSEYFLSKEDMEEVAFALELSNVNFIWVARFPKGEERNLEDALPKGFLERIGERGRVLDKFAPQPRILNHPSTGGFISHCGWNSAMESIDFGVPIIAMPIHNDQPINAKLMVELGVAVEIVRDDDGKIHRGEIAETLKSVVTGETGEILRAKVREISKNLKSIRDEEMDAVAEELIQLCRNSNKSK

SEQ ID NO: 450 - protein, 442 aa, Artificial Sequence
  engineered beta-1,2-glycosyltransferase encoded in plasmid pA33154
GAPLQRVLMFPWLAYGHISPFLNLARQLADRGFLIYLVSTRVNLESIKKKIPEKYANSIHLWESQLPHLPELPPHLHTTNGLPPHLNPVLHKALKLSKPNLSRVLQNLNPTLLLSDALQPWSSQVANEQNIPAGRSLTSCAAVFSYMFTHRKNPGNEFPFPAIRLPEVAKDKTREALRTEPEEAGRLPEGNKNAMLMCTSRTIEAKYIDYLTELDNWKVVPVGPPFQTVLTNDLDNKELMRWLGTKPPNSTVFVSFGSEYFLSKEDMEEVAFALELSNVNFIWVARFPKGEERRLEDALPPGFLERIRERGRVLDKFAPQPRILNHPATGGFISHCGWNSAMESIDFGVPIIAMPQHNDQPINAKLMRELGVAVEVVRDDEGKIHREEIAKTLKSVVTGETGERLRRKCAEFAKRLKAARDEEMDAVALELIKLGRNSNKSK

SEQ ID NO: 451 - protein, 442 aa, Artificial Sequence
  engineered beta-1,2-glycosyltransferase encoded in plasmid pA33159
MATNLRVLMFPWLAYGHISPFLNIAKQLADRGFLIYLCSTRINLESIIKKIPEKYADSIHLIELQLPELPELPPHYHTTNGLPPHLNPTLHKALKMSKPNFSRILQNLKPDLLIYDVLQPWAEHVANEQNIPAGKLLTSCAAVFSYFFSFRKNPGVEFPFPAIHLPEVEKVKIREILAKEPEEGGRLDEGNKQMMLMCTSRTIEAKYIDYCTELCNWKVVPVGPPYQTAAPNDLDNKELMRWLGTKPEHSTVFVSFGSEAFLSKEDMEEVAFALELSSVNFIWVARFPKGEEARLEDALPPGFLDRIRERGRVLDRFAPQPRILNHKATGGFISHCGWNSAMEAIDFGVPIIAMPQTNDQPINAKLMVELGVAVEVRRDDEGKIPREEIAKTLKSVVTGETGERLRANCREIAERLKRSRDVEMDAVALELIKLGRNSNKSK

SEQ ID NO: 452 - protein, 442 aa, Artificial Sequence
  engineered beta-1,2-glycosyltransferase encoded in plasmid pA33160
LAQNLRVTMFPWQAQGHIGPFLNIAKQLADRGFLIYLLSSMINLESAKKKITEKYAPSIHLIELPLPLLPELPPHYHTTNALPPHLNKTLRKALKMASGNFGRISSNLKPTLLIYDALQPWSETVANGQGVPAGKLLTSCAAVFAYFWSFRTNPGNEFPFEAISLPESAKVKHREALARVSEELFRLMEANKQMMLMCTSRTIEAKYIDYCAKFANWQVVPVGAPFQDLITNDADNKELIDWLGTKHENSTVFVSFGSEYFLSKEDMEEVAFALELSNVNFIWVARFPKGEERNLEDALPKGFLERIGERGRVLDKFAPQPRILNHPSTGGFISHCGWNSAMESIDFGVPIIAMPIHNDQPINAKLMVELGVAVEIVRDDDGKIHRGEIAETLKSVVTGETGEILRAKVREISKNLKSIRDEEMDAVAEELIQLCRNSNKSK

SEQ ID NO: 453 - protein, 442 aa, Artificial Sequence
  engineered beta-1,2-glycosyltransferase encoded in plasmid pA33162
MATNLRVLMFPWLAYGHISPFLNIAKQLADRGFLIYLCSTRINLESIIKKIPEKYADSIHLIELQLPELPELPPHYHTTNGLPPHLNPTLHKALKMSKPNFSRILQNLKPDLLIYDVLQPWAEHVANEQNIPAGKLLTSCAAVFSYFFSFRKNPGVEFPFPAIHLPEVEKVKIREILAKEPEEGGRLDEGNKQMMLMCTSRTIEAKYIDYCTELCNWKVVPVGPPFLTLIQLDADNKELMDWLGTKPPNSTVFVSFGSEYFLSKEDLEEIAFALELSGVNFIWVVRFPKGEEATLIDALPKGFSERIRERGRVLDKFAPQQHILNHPATGGFISHCGWNSAMEAIDFGVPIIAMPIQNDQPINAKLMVELGVAVEIPRDDDGRITREAIAEVLKSVVTSETGEILRKNVRELAELLKRIRDVEMDIVALTLIILCRNSSKSV

SEQ ID NO: 454 - protein, 442 aa, Artificial Sequence
  engineered beta-1,2-glycosyltransferase encoded in plasmid pA33163
MAQNLKVLMFPWLALGHILPFLCIAKQLADRGFIIYLCNTRINLESIIKKITNKYLDLIHLITLSLPELPELPPYYWTTNGLPPHLNALLHKALKLSAPEVSRILQTIKPDLLIYDVLQPWASKVANEQNIPAGRLATSCAAVFSYMFSFRDRLGVEFPFEAIHLPEKAKVKIQEIVNKESEEGGRLSEFNVQMMLMCTSRTIEAKYIDYCTELDNWKVVPVGPPYLLLITNDLDNKELIDWLGTKPENSTVFVSFGSEYFLSKEDMEEVAWALVLSNVNFIWVARFPKGEEANLEDALPPGFLDRIRERGRVLDGFAPQLRILNHKATGGFISHCGWNSAMEAIDFGVPIIAMPILNDQPINAKLMVELGVAVEIRRDDEGKIHRSEIVKVLKSVVTGELGEILRARVRELSERLKRIRDEEMTIVALELIRLCRNSNKAV

SEQ ID NO: 455 - protein, 442 aa, Artificial Sequence
  engineered beta-1,2-glycosyltransferase encoded in plasmid pA33164
MALLLRVLMFPWLALGHILPFLCIAKQLADRGFLIYLCSTKINLELIKKKITYKYFDLIHLWELALHLLPELPPYLHTTNALPPHLNKTLHKALKLAAPTFSRIISNLKLTLLIYDVLLPWAETVANRQNIPAGRLLTSCAAVFAYFVQFRDLPGVEFPFEAIHLPEVELVKIYEALAKEREEGFRLMHANVQMMLMCTSRTIEAKYIDYLQELCNWKVVPVGPPFLTLIFEDASNKELIDWLGTKPENSTVFVSFGSEYFLSKEDMEEVAFALELSNVNFIWVARFPKGEERTLEDALPPGFLERVGERGRVLDRFAPQAAILNHPATGGFISHCGWNSAMEAIDFGVPIIAMPIHNDQPINAKLMVELGVAVEIVRQDEGKIHREEIAKVLKSVVTGELGEILRANVREISERLKSIRDVEMDAVAEELIQLCRHSNKTN

SEQ ID NO: 456 - protein, 442 aa, Artificial Sequence
  engineered beta-1,2-glycosyltransferase encoded in plasmid pA33165
MATNLRVLMFPWLAYGHISPFLNIAKQLADRGFLIYLCSTRINLESIIKKIPEKYADSIHLIELQLPELPELPPHYHTTNGLPPHLNPTLHKALKMSKPNFSRILQNLKPDLLIYDVLQPWAEHVANEQNIPAGKLLTSCAAVFSYFFSFRKNPGVEFPFPAIHLPEVEKVKIREILAKEPEEGGRLDEGNKQMMLMCTSRTIEAKYIDYCTELCNWKVVPVGPPFQDLIYNDADNTELIRWLGTKPPNSTVFVSFGSEAFLSKEQMEEIAFALELSNVPFIWVARFPKGEERPLEDALPPGFLDRIRERGRVRDGFAPQPRILSHRSTGGFISHCGWNSAMEAIDFGVPIIAMPIHNDQPINAKLMVELGVAVEIRRDDDGRIPRDEILRCLKSVVTGETGERLRRNVAELARRLKLARDVEMDAVADELRKLGRNPNKTK

SEQ ID NO: 457 - protein, 442 aa, Artificial Sequence
  engineered beta-1,2-glycosyltransferase encoded in plasmid pA33166
GAPLLRVLMFPWLAYGHILPFLNIARQLADRGFLIYLLSTKINLNSVIKKITEKYVQLIHLITLSLPELPELPPHLHTTNGLPPHLNAVLHKALKLAKGEFSRILQTLNPTLLIYDLLLPWASQVAESQNIPAGGLLTSCAAVYAYMVTHNKLLGNEFPFPEIHLPELEKDKTQEIVARLPEELFRLSEFNVNMMLMCTSRTIEAKYIDYCTDLDNWKVVPVGPPFQDLITNDADNKELIDWLGTKHENSTVFVSFGSEYFLSKEDMEEVAFALELSNVNFIWVARFPKGEERNLEDALPKGFLERIGERGRVLDKFAPQPRILNHPSTGGFISHCGWNSAMESIDFGVPIIAMPIHNDQPINAKLMVELGVAVEIVRDDDGKIHRGEIAETLKSVVTGETGEILRAKVREISKNLKSIRDEEMDAVAEELIQLCRNSNKSK

SEQ ID NO: 458 - protein, 442 aa, Artificial Sequence
  engineered beta-1,2-glycosyltransferase encoded in plasmid pA33167
CADNLRVLMFPWLAQGHIGPFLNIAKQLADRGFIIYLQSSKVNLNSIKKKITNKYANLIHLITSQLPLLPELPPRYHTTNGLPPALNMTLHKALKLSKPELSRILSTLKPDLLIADALAPWAEQSANEQGIPQGKLLTSCAAVFAYFFSFRTNPGLPFLFPEIRLPETEKAKIREALAREPTEGGRLSEGGKQMMLMCTSRTIEAKYIDYCMKLCNWKVVPVGAPFQDLITNDADNKELIDWLGTKHENSTVFVSFGSEYFLSKEDMEEVAFALELSNVNFIWVARFPKGEERNLEDALPKGFLERIGERGRVLDKFAPQPRILNHPSTGGFISHCGWNSAMESIDFGVPIIAMPIHNDQPINAKLMVELGVAVEIVRDDDGKIHRGEIAETLKSVVTGETGEILRAKVREISKNLKSIRDEEMDAVAEELIQLCRNSNKSK

SEQ ID NO: 459 - protein, 442 aa, Artificial Sequence
  engineered beta-1,2-glycosyltransferase encoded in plasmid pA33168
GAQSLTVLMFPWLALGHILPFLSIAKQLADRGFIIYLCSTQINLEMIIKKITEKYADLIQLIELTLPELPELPPHYHTTNALPPHLNMTLHKALKMSAPEFSRILQNLKADLLIYDVLAPWAEKVAEEQNIPAGKLLTSCAAVFAYMFQFVKRPGVEFLFPAIHLPEVALVKIIEILIKLPPEGGRLDEQNVQIMLMCTSRTIEAKYIDYCQELLNWKVVPVGPPYQTVIMLDARNKELIDWLGTKHENSTVFVSFGSEYFLSKEQMEEVAFALVVSNVNFIWVVRFPKGEERRLIDALPNGFLDRVRERGRVLDGFAPQLHILNHKSTGGFISHCGWNSAMEAIDFGVPIIAMPILNDQPINAKLMVELGVAVEIRRDDEGKITRDEIVKVLKSVVTSELREILRAKVAEISKLLKSIRDLEMDIVAEELIRLCRNSNKSK

SEQ ID NO: 460 - protein, 454 aa, Artificial Sequence
  engineered beta-1,2-glycosyltransferase encoded in plasmid pA32557
MGTEVTVHKNTLRVLMFPWLAEGHIEPFLNVAKKLVDRGFLIYLCSTAINLKSTIKKIPEKYSDSIQLIELHLPELPELPPHYHTTNGLPPHLNHTLQKALKMSKPNFSKILQNLKPDLVIYDFLQQWAEGVANEQNIPAVKLLTSGAAVLSYFFNLVKKPGVEFPFPAINLRKNELEKMSELLAQSAKDKEPDGVDPFADGNMQVMLMSTSRIIEAKYIDYFSGLSNWKVVPVGPPVQDPIADDADEKELIDWLGKKDENSTVYVSFGSEYFLSKEDREEIAFGLELSNVNFIWVARFPKGEEQNLEDALPKGFLERIGDRGRVLDHFAPQPRILNHPSTGGFISHCGWNSVLESIDFGVPIIAMPIQLDQPMNARLIVELGVAVEIVRDDYGKIHREEIAEILKDVIAGKSGENLKAKMRDISENLKSIRDEEMDTAAEELIQLCKNSPKLK

SEQ ID NO: 461 - protein, 454 aa, Artificial Sequence
  engineered beta-1,2-glycosyltransferase encoded in plasmid pA32558
MGTEVTVHKNTLRVLMFPWLAEGHIEPFLNVAKKLVDRGFLIYLCSTAINLKSTIKKIPEKYSDSIQLIELHLPELPELPPHYHTTNGLPPHLNHTLQKALKMSKPNFSKILQNLKPDLVIYDLLQQWAEGVANEQNIPAVKLLTSGAAVLSYFFNLVKKPGVEFPFPAINLRKNELEKMSELLAQSAKDKEPDGVDPFADGNMQVMLMSTSRIIEAKYIDYFSGLSNWKVVPVGPPVQDPIADDADEMELIDWLGKKDENSTVYVSFGSEYFLSKEDREEIAFGLELSNVNFIWVARFPKGEEQNLEDALPKGFLERIGDRGRVLDKFAPQPRILNHPSTGGFISHCGWNSVMESVDFGVPIIAMPIHLDQPMNARLIVELGVAVEIVRDDYGKIHREEIAEILKDVIAGKSGENLKAKMRDISKNLKSIRDEEMDTAAEELIQLCKNSPKLK

SEQ ID NO: 462 - protein, 454 aa, Artificial Sequence
  engineered beta-1,2-glycosyltransferase encoded in plasmid pA32559
MGTEVTVHKNTLRVLMFPWLAEGHIEPFLNVAKKLVDRGFLIYLCSTAINLKSTIKKIPEKYSDSIQLIELHLPELPELPPHYHTTNGLPPHLNHTLQKALKMSKPNFSKILQNLKPDLVIYDFLQQWAEGVANEQNIPAVKLLTSGAAVLSYFFNLVKKPGVEFPFPAINLRKNELEKMSELLAQSAKDKEPDGVDPFADGNMQVMLMSTSRIIEAKYIDYFSGLSNWKVVPVGPPVQDPIADDADEKELIDWLGKKDENSTVYVSFGSEYFLSKEDREEIAFGLELSNVNFIWVARFPKGEEQNLEDALPKGFLERIGDRGRVLDHFAPQPRILNHPSTGGFISHCGWNSVLESVDFGVPIIAMPIQLDQPMNARLIVELGVAVEIVRDDYGKIHREEIAEILKDVIAGKSGENLKAKMRDISKNLKSIRDEEMDTAAEELIQLCKNSPKLK

SEQ ID NO: 463 - protein, 454 aa, Artificial Sequence
  engineered beta-1,2-glycosyltransferase encoded in plasmid pA32560
MGTEVTVHKNTLRVLMFPWLAEGHIEPFLNVAKKLVDRGFLIYLCSTAINLKSTIKKIPEKYSDSIQLIELHLPELPELPPHYHTTNGLPPHLNHTLQKALKMSKPNFSKILQNLKPDLVIYDLLQQWAEGVANEQNIPAVKLLTSGAAVLSYFFNLVKKPGVEFPFPAIYLRKNELEKMSELLAQSAKDKEPDGVDPFADGNMQVMLMSTSRIIEAKYIDYFSGLSNWKVVPVGPPVQDPIADDADEMELIDWLGKKDENSTVYVSFGSEYFLSKEDREEIAFGLELSNVNFIWVARFPKGEEQNLEDALPKGFLERIGDRGRVLDKFAPQPRILNHPSTGGFISHCGWNSVMESVDFGVPIIAMPIHLDQPMNARLIVELGVAVEIVRDDYGKIHREEIAEILKDVIAGKSGENLKAKMRDISKNLKSIRDEEMDTAAEELIQLCKNSPKLK

SEQ ID NO: 464 - protein, 454 aa, Artificial Sequence
  engineered beta-1,2-glycosyltransferase encoded in plasmid pA32562
MGTEVTVHKNTLRVLMFPWLAEGHIEPFLNVAKKLVDRGFLIYLCSTAINLKSTIKKIPEKYSDSIQLIELHLPELPELPPHYHTTNGLPPHLNHTLQKALKMSKPNFSKILQNLKPDLVIYDFLQQWAEGVANEQNIPAVKLLTSGAAVLSYFFNLVKKPGVEFPFPAINLRKNELEKMSELLAQSAKDKEPDGVDPFADGNMQVMLMSTSRIIEAKYIDYFSGLSNWKVVPVGPPVQDPIADDADEKELIDWLGKKDENSTVYVSFGSEYFLSKEDREEIAFGLELSNVNFIWVARFPKGEEQNLEDALPKGFLERIGDRGRVLDHFAPQPRILNHPSTGGFISHCGWNSVMESVDFGVPIIAMPIQLDQPMNARLIVELGVAVEIVRDDYGKIHREEIAEILKDVIAGKSGENLKAKMRDISKNLKSIRDEEMDTAAEELIQLCKNSPKLK

SEQ ID NO: 465 - protein, 454 aa, Artificial Sequence
  engineered beta-1,2-glycosyltransferase encoded in plasmid pA32563
MGTEVTVHKNTLRVLMFPWLAEGHIEPFLNVAKKLVDRGFLIYLCSTAINLKSTIKKIPEKYSDSIQLIELHLPELPELPPHYHTTNGLPPHLNHTLQKALKMSKPNFSKILQNLKPDLVIYDLLQQWAEGVANEQNIPAVKLLTSGAAVLSYFFNLVKKPGVEFPFPAINLRKNELEKMSELLAQSAKDKEPDGVDPFADGNMQVMLMSTSRIIEAKYIDYFSGLSNWKVVPVGPPVQDPIADDADEKELIDWLGKKDENSTVYVSFGSEYFLSKEDREEIAFGLELSNVNFIWVARFPKGEEQNLEDALPKGFLERIGDRGRVLDHFAPQPRILNHPSTGGFISHCGWNSVMESVDFGVPIIAMPIHLDQPMNARLIVELGVAVEIVRDDYGKIHREEIAEILKDVIAGKSGENLKAKMRDISKNLKSIRDEEMDTAAEELIQLCKNSPKLK

SEQ ID NO: 466 - protein, 454 aa, Artificial Sequence
  engineered beta-1,2-glycosyltransferase encoded in plasmid pA32565
MGTEVTVHKNTLRVLMFPWLAEGHISPFLNVAKKLVDRGFLIYLCSTAINLKSTIKKIPEKYSDSIQLIELHLPELPELPPHYHTTNGLPPHLNHTLQKALKMSKPNFSKILQNLKPDLVIYDLLQQWAEGVANEQNIPAVKLLTSGAAVLSYFFNLVKKPGVEFPFPAIYLRKNELEKMSELLAQSAKDKEPDGVDPFADGNMQVMLMSTSRIIEAKYIDYFSGLSNWKVVPVGPPVQDPIADDADEMELIDWLGKKDENSTVYVSFGSEYFLSKEDREEIAFGLELSNVNFIWVARFPKGEEQNLEDALPKGFLERIGDRGRVLDHFAPQPRILNHPSTGGFISHCGWNSVMESVDFGVPIIAMPIHLDQPMNARLIVELGVAVEIVRDDYGKIHREEIAEILKDVIAGKSGENLKAKMRDISKNLKSIRDEEMDTAAEELIQLCKNSPKLK

SEQ ID NO: 467 - protein, 454 aa, Artificial Sequence
  engineered beta-1,2-glycosyltransferase encoded in plasmid pA32566
MGTEVTVHKNTLRVLMFPWLAEGHIEPFLNVAKKLVDRGFLIYLCSTAINLKSTIKKIPEKYSDSIQLIELHLPELPELPPHYHTTNGLPPHLNHTLQKALKMSKPNFSKILQNLKPDLVIYDFLQQWAEGVANEQNIPAVKLLTSGAAVLSYFFNLVKKPGVEFPFPAINLRKNELEKMSELLAQSAKDKEPDGVDPFADGNMQVMLMSTSRIIEAKYIDYFSGLSNWKVVPVGPPVQDPIADDADEKELIDWLGKKDENSTVYVSFGSEYFLSKEDREEIAFGLELSNVNFIWVARFPKGEEQNLEDALPKGFLERIGDRGRVLDKFAPQPRILNHPSTGGFISHCGWNSVLESIDFGVPIIAMPIQLDQPMNARLIVELGVAVEIVRDDYGKIHREEIAEILKDVIAGKSGENLKAKMRDISENLKSIRDEEMDTAAEELIQLCKNSPKLK

SEQ ID NO: 468 - protein, 454 aa, Artificial Sequence
  engineered beta-1,2-glycosyltransferase encoded in plasmid pA33169
MGTEVTVGKLTLTVLMFPWLAEGHIGPFLRVAKDLGDRGFLIYLQSTAINLNSTIKKIPYKYSPSIHLIEYALPELPELPPHLHTTNGLPPHLNHTLQKALKLAKGELSKILSNLKADLVIYDALLQWAEGVANDQGIPSVKLLTFGAAVLAYMWNLNKKPGHEFLFPAIYLRKSEKEKMQEALAQSAKDAESDGLDPFADGNAQAMLMSTSRVIEATYIDYLSKLLNWKVVPVGTPVRDPVFDDLDEKELIDWLGKKDPHSTVFVSFGSEYFLSKRDREEIAFGLELSNLNFIWVARFPKGEEQTLEDALPKGFTERVGDRGRVLTHFAPQARILSHPSTGGFISHCGWNSVMEAVDFGVPIIAMPILLDQPMNARLIVELGVAVEVVRDDEGKVTRDELARILRDVIQGKSGENLKKNMRDIAKLLKAIRDPEMDTAAEELLKLCKNSAKFN

SEQ ID NO: 469 - protein, 454 aa, Artificial Sequence
  engineered beta-1,2-glycosyltransferase encoded in plasmid pA33171
MGTEVTRHKLTLRVLMFPWQAQGHISPFLRVAKDLGDRGFIIYVQSTKVNLNSTKKKITEKYQPSIQLIELHLPLLPELPPYYHTTNGLPPHLNHTLQKALKMAKPTFSKILQNLSIDLVIYDALLQWAEQVANDQGIPAVKLLTSGAAVLAYFVNLNKLLGNEFPFPAINLRKNELEKLQELLAQSAKDKLPDDLFPFADQNSQVMLMSTSRVIEAKYIDYFAKFSNWQVVPVGTPVQDAVQDDYDEKELIDWLGKKPPNSTVFVSFGSEYFLSKETLEEIAFGLELSGANFIWVARFPKGEEQNLIDALPPGFLERIGDRGRVVTKFAPQPAILSHPSTGGVISHCGWNSVMEAVDFGVPIIAMPQHLDQPMNARLIVELGVAVEIRRDDYGKIHRSEIAEIIRDVIFSKSGENLKRNMADLAENLKRARDEEMDCAAEELRQLCKHSPKLK

SEQ ID NO: 470 - protein, 454 aa, Artificial Sequence
  engineered beta-1,2-glycosyltransferase encoded in plasmid pA33172
MGTEVTVHKNTLRVLMFPWLAYGHISPFLNVAKKLVDRGFLIYLCSTAINLKSTIKKIPEKYSDSIQLIELHLPELPELPPHYHTTNGLPPHLNHTLQKALKMSKPNFSKILQNLKPDLVIYDLLQQWAEGVANEQNIPAVKLLTSGAAVLSYFFNLVKKPGVEFPFPAIYLRKNELEKMSELLAQSAKDKEPDGVDPFADGNMQVMLMSTSRIIEAKYIDYFSGLSNWKVVPVGPPVQDMVALDYDEKELMDWLGKKPPNSTVFVSFGSEYFLSKRQLEEIAFGLELSGVNFIWVARFPKGLEQTLIDALPPGFLERIGDRGRVLTHFAPQQRILNHPATGGFISHCGWNSVMEAVDAGVPIIAMPQQLDQPMNARLIVELGVAVEIVRDDYGLIHRDEIVKIIRDVIQSPSGEKLKKNMADIAKLLKLIRDEEMDTAADALIQLCKNLPKSN

SEQ ID NO: 471 - protein, 454 aa, Artificial Sequence
  engineered beta-1,2-glycosyltransferase encoded in plasmid pA33173
MGTEVTVLKNTLRVLMFPWLALGHILPFLSLAKKLVDRGFIIYLLSTAINLNLTKKKITYKYQPLIQLIELTLPELPELPSYLHTTNALPPALNMLLQKALKMAKGTLSKIIEDLSLDLVIVDFLLQWASKVCNSQGIPAVKLLTSGAAVLAYFFNVNKLLGDEFLFEAISLRKLALEKMTELLAQSAKDKESTDVFPFAVQNAQIMLMSTSRIIEAKYIDYLMKLANWQVVPVGTPVQDPIADDADEMELIDWLGKKDENSTVFVSFGSEYFLSKEDREEIAFGLELSNVNFIWVARFPKGEEQNLEDALPKGFLERIGDRGRVLDKFAPQPRILNHPSTGGFISHCGWNSVMESVDFGVPIIAMPIHLDQPMNARLIVELGVAVEIVRDDYGKIHREEIAEILKDVIAGKSGENLKAKMRDISKNLKSIRDEEMDTAAEELIQLCKNSPKLK

SEQ ID NO: 472 - protein, 454 aa, Artificial Sequence
  engineered beta-1,2-glycosyltransferase encoded in plasmid pA33174
MGTEVTVLKNTLRVLMFPWLAQGHIGPFLRVAKDLVDRGFLIYLLSTKINLNLTIKKITNKYSPSIQLIELTLHELPELPSRLHTTNGLPPALNAVLQKALKMAKGNLSKIVSNLSADLVIYDALLQWAEGVANEQGIPSVKLATSGAAVLAYMFNWNTLPGNEFPFEAIRLRKSEKEKLQEAMAQSAKDKERDGLDPFADGNSNIMLMSTSRIIEAKYIDYLSKFANWKVVPVGTPVRDPAACDYDEKELIDWLGKKDPHSTVFVSFGSEYFLSKETREEIAFGLELSNVNFIWVARFPKGEEQTLEDALPKGFLERAGDRGRVLTRFAPQLRILNHKSTGGFISHCGWNSVMEAVDAGVPIIAMPILLDQPMNARLIVELGVAVEIRRRDGGKITREEIAKILKDVISGKSGENLKRKMRDIAKALKAIRDEEMTTAAEELRRLCKNSSKFN

SEQ ID NO: 473 - protein, 454 aa, Artificial Sequence
  engineered beta-1,2-glycosyltransferase encoded in plasmid pA33175
MGTEVTVHKLSLQVTMFPWLAEGHIGPFLRVAKDLVDRGFLIHVCSTQINLNSTAKKITEAYSDSIHLWELALPELPELPPHLHTTNGLPPHLNHTLQKALKLAKPELSKILSNLKSDLVIYDLLLQWAEQVANDQNVPAVGLLTSGAAVLAYMWNLNKKLGVEFLFPAIYLRKSEKDKMSEALAQSAKDKESDDVDPFADQNAQAMLMSTSRIIEAKYIDYLAGFLNWKVVPVGPPVQDAIFDDLDEMELMDWLGKKPENSTVFVSFGSEYFLSKEDREEIAWGLELSNANFIWVARFPKGEEQTLEDALPKGFLERVGDRGRVLDHFAPQLAILNHPSTGGFISHCGWNSVMEAVDAGVPIIAMPILLDQPMNARLIVELGVAVEIVRDDEGRITRDAIAKIIKDVIFSKSGENLKANMADLSELLKRARDPEMDTAAVELRKLCKRSAKFN

SEQ ID NO: 474 - protein, 454 aa, Artificial Sequence
  engineered beta-1,2-glycosyltransferase encoded in plasmid pA33176
MGTEVTVHKNTLTVLMFPWLALGHIGPFLNVAKDLVDRGFLIYVLSTAVNLNSTKKKITEKYQQSIHLIEYPLPELPELPSYLHTTNALPPALNHTLQKALKLSKGTLSKILSNIRAALVIYDALLQWAEKVANEQNIPAVKLLTSGAAVLAYFFTLNKKLGVEFLFPAIYLRKLELRKMQEALAQSAKDAESDGLDPFADANAQVMLMSTSRVIEAKYIDYFAKLSNWKVVPVGAPVRDLVMLDADEKELMDWLGKKDPNSTVFVSFGSEYFLSKEDLEEIAFGLELSGVNFIWVARFPKGLEQSLEDALPKGFSDRIGDRGRVLTKFAPQLRVLNHPATGGFISHCGWNSVMEAVDAGVPIIAMPIHLDQPMNARLIVELGVAVEIVRDDYGRITREEIAKILRSVIASKSGEKLKANMRDFAKLLKSARDEEMDTAAEELIKLCKHLLKLK

SEQ ID NO: 475 - protein, 454 aa, Artificial Sequence
  engineered beta-1,2-glycosyltransferase encoded in plasmid pA33177
MGTEVTVMKNTLRVLMFPWLALGHILPFLRLAKKLVDRGFLIYLLSTKINLNLTKKKITEKYLDLIQLIELTLPELPELPPYLHTTNALPPHLNMVLRRALKLAAPTLSKILSNLKLTLVIADALLQWSSKVANSQGIPQVKLLTSGAAVLAYMWNLNDLLGVEFLFEAINLRKLEKDKMLELLAQSAKDKERDGVFPFADAYMNIMLMSTSRVIEAKYIDYLMKFLNWQVVPVGAPVQDPIADDADEMELIDWLGKKDENSTVFVSFGSEYFLSKEDREEIAFGLELSNVNFIWVARFPKGEEQNLEDALPKGFLERIGDRGRVLDKFAPQPRILNHPSTGGFISHCGWNSVMESVDFGVPIIAMPIHLDQPMNARLIVELGVAVEIVRDDYGKIHREEIAEILKDVIAGKSGENLKAKMRDISKNLKSIRDEEMDTAAEELIQLCKNSPKLK

SEQ ID NO: 476 - protein, 454 aa, Artificial Sequence
  engineered beta-1,2-glycosyltransferase encoded in plasmid pA33178
MGTEVTVLKNTLRVTMFPWLAYGHIGPFLRVAKKLVDRGFLIHVLSTAVNLKSTAKKIPEKYQPSIQLIELHLPLLPELPSHLHTTNGLPPHLNHTLQRALKLAKPNLSKNLQDLKPDLVISDFLQQWSSRVANDQGIPQVGLLTSGAAVLSYMWNHVTKPGNEFPFEAIYLRKNALDKTSEAMAQSAKDKEPDDLDPFADANMQVMLMSTSRVIEAKYIDYFAKLSNWQVVPVGTPVQTATADDISEKELMDWLGKKPPNSTVFVSFGSEYFLSKEDREEIAFGLELSGVNFIWVVRFPKGLEQSLEDALPPGFSERIGDRGRVVTKFAPQPAILSHPSTGGVISHCGWNSVMESVDFGVPIIAMPQHLDQPMNARLIVELGVAVEVVRDDEGKVHRDEIARITRDVIMSKSGENLKKKMADLAKLLKAARDEEMDTAAEALIKLCKKSPKAN

SEQ ID NO: 477 - protein, 454 aa, Artificial Sequence
  engineered beta-1,2-glycosyltransferase encoded in plasmid pA33179
MGTSVTRLKNTLRVLMFPWQAQGHIGPFLRVAKDLGDRGFIIYVCSSSVNLNLTKKKITEKYQDSIQLIELHLPLLPELPPYLHTTNGLPPHLNHTLQKALKMAKPTYSKILSNLKIDLVISDLLLQWSEQVANDQNIPQVKLLTSGAAVLAYMVNLNKKPGVEFPFPAIYLRKNELRKMQEALAQSAKDKESDDVDPFADQNSQAMLMSTSRIIEAKYIDYFAGFSNWQVVPVGPPVQDLIASDLHEMELMRWLGKKPEHSTVFVSFGSEYFLSKRTLEEIAFGLELSNANFIWVARFPKGEEQNLIDALPPGFLERIGDRGRVVDKFAPQQAILNHPSTGGVISHCGWNSVMEAVDAGVPIIAMPITLDQPMNARLIVELGVAVEICRDDYGVIHREEIAQIIKDVIFSKSGENLKANMRDLSELLKRARDEEMDTAAEELRRLCKHSPKLN

SEQ ID NO: 478 - protein, 454 aa, Artificial Sequence
  engineered beta-1,2-glycosyltransferase encoded in plasmid pA33180
MGTEVTVHKNTLRVLMFPWLAYGHISPFLNVAKKLVDRGFLIYLCSTAINLKSTIKKIPEKYSDSIQLIELHLPELPELPPHYHTTNGLPPHLNHTLQKALKMSKPNFSKILQNLKPDLVIYDLLQQWAEGVANEQNIPAVKLLTSGAAVLSYFFNLVKKPGVEFPFPAIYLRKNELEKMSELLAQSAKDKEPDGVDPFADGNMQVMLMSTSRIIEAKYIDYFSGLSNWKVVPVGPPVQDLVMDDISEKELIDWLGKKPPHSTVFVSFGSEYFLSKEDREEIAFGLELSNANFIWVARFPKGEEQTLEDALPKGFTERVGDRGRVLTHFAPQARILSHPSTGGFISHCGWNSVMEAVDFGVPIIAMPILLDQPMNARLIVELGVAVEVVRDDEGRVTRDELARIIRDVIFSKSGENLKKNMRDLAKLLKAARDPEMDIAAVALRALCKHHAKLN

SEQ ID NO: 479 - protein, 454 aa, Artificial Sequence
  engineered beta-1,2-glycosyltransferase encoded in plasmid pA33181
MGTEVTVHKLTLRVLMFPWQAQGHISPFLRVAKDLVDRGFLIYVVSTAVNLNSTAKKITEKYQPSIQLITLHLPLLPELPSHYHTTNGLPPALNHTLQKALKMAKPEFSKILQNLRADLVIYDFLLQWASQSANEQGVPSVKLLTSGAAVLAYFKNLNKKPGQEFPFEAISLRKNELDKMQELLAQSAKDKLPTDLFPFADANSQAMLMSTSRIIEAKYIDYLAKLSNWQVVPVGTPVQDAVADDYDEKELIDWLGKKPPNSTVFVSFGSESFLSKEQLEEIAFGLELSGSNFIWVARFPKGLEQNLIDALPPGFLERIGDRGRVVTHFAPQPRILSHPSTGGVISHCGWNSVMEAVDFGVPIIAMPQHLDQPMNARLIVELGVAVEVRRDDEGKIHREELAEIVRDVIHSKSGENLKANMRDLAENLKRARDEEMDTAAEELRQLCKNSAKLN

SEQ ID NO: 480 - protein, 454 aa, Artificial Sequence
  engineered beta-1,2-glycosyltransferase encoded in plasmid pA33182
MVTEVTVLKNLLRVLMFPWQAEGHIGPFLRVAKDLVDRGFLISVQNTSVNLNLTKKKITEKYQPSIQLITLHLPHLPELPSHLHTTNGLPPALNHTLQRALKLAKPTVSKQLSNLKLTLVISDALLQWSSQVANDQNIPSVKLATSGAAVLAYMFNVNKLPGNEFLFPAISLRKSAKRKLLEAMAQSAKDKESDDLDPFADQNSAAMLMSTSRVIEAKYIDYLAKFLNWQVVPVGTPVQDPIADDADEMELIDWLGKKDENSTVFVSFGSEYFLSKEDREEIAFGLELSNVNFIWVARFPKGEEQNLEDALPKGFLERIGDRGRVLDKFAPQPRILNHPSTGGFISHCGWNSVMESVDFGVPIIAMPIHLDQPMNARLIVELGVAVEIVRDDYGKIHREEIAEILKDVIAGKSGENLKAKMRDISKNLKSIRDEEMDTAAEELIQLCKNSPKLK

SEQ ID NO: 481 - protein, 454 aa, Artificial Sequence
  engineered beta-1,2-glycosyltransferase encoded in plasmid pA33184
MGTEVTVGKNTLRVLMFPWLAQGHIGPFLRVAKKLVDRGFIIYLVSTSINLKSTIKKITEKYSPSIQLIELHLPELPELPPHLHTTNGLPPALNHTLRKALKMAKPEFSKILSTLKSTLVIYDFLLQWASGSANEQGIPSVKLATSGAAVLAYMKNLNKKPGQEFLFEAISLRKNELEKMSEAMAQSAKDAERDGLFPFADGNSNAMLMSTSRIIEAKYIDYLSKLSNWKVVPVGTPVQDPVACDYDEKELIDWLGKKDPNSTVFVSFGSEYFLSKEQREEIAFGLELSGLNFIWVARFPKGLEQSLEDALPKGFLERIGDRGRVLTHFAPQPRILSHPSTGGFISHCGWNSVMEAVDFGVPIIAMPQHLDQPMNARLIVELGVAVEIRRDDEGKIHREEIAQILRDVIQGKSGENLKANMRDIAEALKRIRDEEMDTAAEELRQLCKNSAKAN

SEQ ID NO: 482 - protein, 454 aa, Artificial Sequence
  engineered beta-1,2-glycosyltransferase encoded in plasmid pA33185
MGTEVTVHKNTLRVLMFPWLAYGHISPFLNVAKKLVDRGFLIYLCSTAINLKSTIKKIPEKYSDSIQLIELHLPELPELPPHYHTTNGLPPHLNHTLQKALKMSKPNFSKILQNLKPDLVIYDLLQQWAEGVANEQNIPAVKLLTSGAAVLSYFFNLVKKPGVEFPFPAIYLRKNELEKMSELLAQSAKDKEPDGVDPFADGNMQVMLMSTSRIIEAKYIDYFSGLSNWKVVPVGPPVLTMLALDIDEKELMDWLGKKPPNSTVFVAFGSEYFLSKEQLEELAFGLELSGVNFIWVVRFPKGLEQTLIDALPTGFLERIRDRGRVLTKFAPQLAILNHKATGGFISHCGWNSVMEAVDAGVPIIAMPIHLDQPMNARLIVELGVAVEIVRDDLGAITREEIVKIIRSVIQSPSGEKLKKNMRDLALLLKAIRDLEMDTAAEALIKLCKHLVKLK

SEQ ID NO: 483 - protein, 454 aa, Artificial Sequence
  engineered beta-1,2-glycosyltransferase encoded in plasmid pA33186
MGTEVTVCKNTLQVTMFPWQAEGHIGPFLRVAKKLVDRGFLIEVQSTAVNLNSTAKKITEKYSPSIHLWEYALPELPELPPHLHTTNGLPPALNHTLQKALKLAKGELSKTLSNLKSDLVINDFLLQWAEQVANDQGVPSVKLLTAGAAVLAYMWNLNKKLGREFLFPAIYLRKSEKDKMSEALAQSAKDKESDDLFPFADQNAQAMLMSTSRVIEAKYIDYLQKFSNWKVVPVGTPVQDPIADDADEMELIDWLGKKDENSTVFVSFGSEYFLSKEDREEIAFGLELSNVNFIWVARFPKGEEQNLEDALPKGFLERIGDRGRVLDKFAPQPRILNHPSTGGFISHCGWNSVMESVDFGVPIIAMPIHLDQPMNARLIVELGVAVEIVRDDYGKIHREEIAEILKDVIAGKSGENLKAKMRDISKNLKSIRDEEMDTAAEELIQLCKNSPKLK

SEQ ID NO: 484 - protein, 454 aa, Artificial Sequence
  engineered beta-1,2-glycosyltransferase encoded in plasmid pA33188
MGTEVTVHKNTLRVLMFPWLAYGHISPFLNVAKKLVDRGFLIYLCSTAINLKSTIKKIPEKYSDSIQLIELHLPELPELPPHYHTTNGLPPHLNHTLQKALKMSKPNFSKILQNLKPDLVIYDLLQQWAEGVANEQNIPAVKLLTSGAAVLSYFFNLVKKPGVEFPFPAIYLRKNELEKMSELLAQSAKDKEPDGVDPFADGNMQVMLMSTSRIIEAKYIDYFSGLSNWKVVPVGPPVQTLVMLDASEKELMDWLGKKPPNSTVFVSFGSEYFLSKEDREEIAFGLELSNVNFIWVVRFPKGEEQTLIDALPDGFLERIRDRGRVLTKFAPQLRILSHPATGGFISHCGWNSVMEAVDAGVPIIAMPIQLDQPMNARLIVELGVAVEIVRDDLGRITRDAIVKIIRDVIQSPSGEKLKKNMRDLAELLKRIRDEEMDIAAVALIQLCKHLAKLN

SEQ ID NO: 485 - protein, 454 aa, Artificial Sequence
  engineered beta-1,2-glycosyltransferase encoded in plasmid pA33189
MGTEVTRLKNTLRVTMFPWLAQGHIGPFLRVAKDLGDRGFIIYLQSTKINLNLTIKKITNKYSPSIQLIELHLPELPELPPYLHTTNGLPPHLNHTLQKALKMAKPGLSKQLSNLSIDLVIYDALLQWAEGVALDQGIPAVKLLTSGAAVLAYMKNWNTRPGNEFPFPAIYLRKNELEKLQEAMAQSAKDAERDGLFPFADGNSAYMLMSTSRVIEAKYIDYFSKLSNWKVVPVGTPVRDPVYSDADEKELMDWLGKKDPHSTVFVSFGSEYFLSKETREEIAFGLELSNVNFIWVARFPKGAEQNLEDALPKGFLERIGDRGRVLTKFAPQAAILSHPSTGGFISHCGWNSVMEAVDFGVPIIAMPQHLDQPMNARLIVELGVAVEIRRDDLGKIHREEIAQILRDVINGKSGENLKKNMRDIAKLLKAIRDEEMDTAAEELRRLCKNSPKLK

SEQ ID NO: 486 - protein, 454 aa, Artificial Sequence
  engineered beta-1,2-glycosyltransferase encoded in plasmid pA33190
MGTEVTVCKNLLRVLMFPWLAQGHIGPFLRVAKDLVDRGFLIHVLSTAVNLNSTAKKITEKYQPSIHLIELPLPELPELPPHLHTTNGLPPHLNHTLQRALKLAKPTLSKNLSTLRVALVIVDFLQQWAEQVANDQGVPAVGLLTSGAAVLAYMKNLNKKLGSEFPFEAINLRKNELAKMQEALAQSAKDAERDGLFPFADANMQATLMSTSRIIEAKYIDYLQKLSNWKVVPVGTPVQDPIADDADEMELIDWLGKKDENSTVFVSFGSEYFLSKEDREEIAFGLELSNVNFIWVARFPKGEEQNLEDALPKGFLERIGDRGRVLDKFAPQPRILNHPSTGGFISHCGWNSVMESVDFGVPIIAMPIHLDQPMNARLIVELGVAVEIVRDDYGKIHREEIAEILKDVIAGKSGENLKAKMRDISKNLKSIRDEEMDTAAEELIQLCKNSPKLK

SEQ ID NO: 487 - protein, 454 aa, Artificial Sequence
  engineered beta-1,2-glycosyltransferase encoded in plasmid pA33191
MGTEVTVGKNTLRVLMFPWQALGHIGPFLRVAKKLVDRGFVIYVVSTAVNLNSTAKKITEKYQPSIQLITLHLPLLPELPPHLHTTNGLPPALNHTLQKALKMAKPELSKILSTLRSTLVIADFLLQWASQSANETGIPSVKLLTSGAAVLAYMKNLNKKPGQEFLFEAISLRKNALDKMSEAMAQSAKDRERDDLFPFADANSQAMLMSTSRIIEAKYIDYLQKLSNWQVVPVGTPVQDPIADDADEMELIDWLGKKDENSTVFVSFGSEYFLSKEDREEIAFGLELSNVNFIWVARFPKGEEQNLEDALPKGFLERIGDRGRVLDKFAPQPRILNHPSTGGFISHCGWNSVMESVDFGVPIIAMPIHLDQPMNARLIVELGVAVEIVRDDYGKIHREEIAEILKDVIAGKSGENLKAKMRDISKNLKSIRDEEMDTAAEELIQLCKNSPKLK

SEQ ID NO: 488 - protein, 454 aa, Artificial Sequence
  engineered beta-1,2-glycosyltransferase encoded in plasmid pA33192
MGTEVTVHKNTLRVLMFPWQAQGHISPFLRVAKDLVDRGFLIYVQSTKINLNSTAKKITEKYQPSIQLITLTLHLLPELPSRYHTTNGLPPALNHTLQKALKMAKGNFSKQVQNLKADLVIYDALLQWAEQVANEQGIPSVKLATSGAAVLAYFFNLNKLPGNEFPFEAIRLRKSEKDKLQELLAQSAKDKEPDGLDPFADANSQIMLMSTSRVIEAKYIDYLQKFSNWKVVPVGTPVQDAAADDYDEKELIDWLGKKPPNSTVFVSFGSEYFLSKEQREEIAFGLELSGANFIWVARFPKGEEQNLIDALPPGFTERIGDRGRVVTHFAPQPRILSHKSTGGFISHCGWNSVMEAVDFGVPIIAMPQLLDQPMNARLIVELGVAVEIRRDDGGKIPRQEIAEIIRDVIFSKSGENLKRKMADLAKNLKAARDEEMDTAALELLQLCKNSRKLN

SEQ ID NO: 489 - protein, 454 aa, Artificial Sequence
  engineered beta-1,2-glycosyltransferase encoded in plasmid pA33193
MGTEVTVGKNTLRVLMFPWQALGHIGPFLNVAKDLVDRGFIIYVCSTSVNLKSTAKKITEKYQDSIQLITLHLPLLPELPPHLHTTNGLPPHLNHVLQKALKMAKPELSKILSTLKSTLVIADLLQQWASQVANETNVPSVKLATSGAAVLAYMKNLNTKLGVEFLFEAIYLRKNELDKMSEAMAQSAKDKESDDVDPFADANSNAMLMSTSRIIEAKYIDYLQGLSNWQVVPVGPPVRDAIACDYDEMELIDWLGKKPENSTVFVSFGSEYFLSKEQLEEIAFGLELSNSNFIWVARFPKGEEQTLIDALPPGFLERIGDRGRVVDHFAPQPRVLNHPSTGGVISHCGWNSVMEAVDAGVPIIAMPIHLDQPMNARLIVELGVAVEIRRDDLGVIHRSEIAKIIKDVIHSKSGENLKANMRDLSENLKRARDEEMDTAAEELRQLCKNSAKAN

SEQ ID NO: 490 - protein, 454 aa, Artificial Sequence
  engineered beta-1,2-glycosyltransferase encoded in plasmid pA33194
MGTSVTVLKNTLRVTMFPWQAYGHIGPFLRVAKKLVDRGFLIYVQSSKVNLKLTKKKIPEKYQPSIQLIELHLPLLPELPPHLHTTNGLPPHLNHTLRKALKMAKPNLSKQLSNLKPDLVISDFLQQWSSQVANDQGIPAVGLLTSGAAVLSYMKNWVTRPGNEFPFPAINLRKNELRKLSEAMAQSAKDKESDDLDPFADANMQAMLMSTSRLIEAKYIDYFAKLSNWQVVPVGTPVQDASAVDAHEKELMDWLGKKPPNSTVFVSFGSEYFLSKRTLEEIAFGLELSGVNFIWVARFPKGEEQNLIDALPPGFLERIGDRGRVVTKFAPQAAILSHPSTGGVISHCGWNSVMESVDFGVPIIAMPQHLDQPMNARLIVELGVAVEIVRDDYGVIHRSEIAKILRDVIHSKSGENLKRKMADLAKLLKAARDEEMDCAAEELIRLCKHSPKLK

SEQ ID NO: 491 - protein, 454 aa, Artificial Sequence
  engineered beta-1,2-glycosyltransferase encoded in plasmid pA33195
MGTEVTVHKNTLRVLMFPWLAYGHISPFLNVAKKLVDRGFLIYLCSTAINLKSTIKKIPEKYSDSIQLIELHLPELPELPPHYHTTNGLPPHLNHTLQKALKMSKPNFSKILQNLKPDLVIYDLLQQWAEGVANEQNIPAVKLLTSGAAVLSYFFNLVKKPGVEFPFPAIYLRKNELEKMSELLAQSAKDKEPDGVDPFADGNMQVMLMSTSRIIEAKYIDYFSGLSNWKVVPVGPPVQDAVYEDADEKELMDWLGKKPPHSTVFVSFGSEYFLSKRTLEEIAFGLELSNANFIWVARFPKGEEQNLIDALPPGFLERIGDRGRVVTKFAPQAAILSHPSTGGVISHCGWNSVMEAVDFGVPIIAMPQHLDQPMNARLIVELGVAVEIRRDDYGVIHRSEIAKIIRDVIFSKSGENLKKNMRDLAELLKRARDEEMDTAAEELRRLCKHSPKLV

SEQ ID NO: 492 - protein, 454 aa, Artificial Sequence
  engineered beta-1,2-glycosyltransferase encoded in plasmid pA33196
MVTEVTVHKNTLRVLMFPWLALGHISPFLRVAKDLVDRGFLIYLLSTNINLNSTKKKITEKYVPSIQLIELSLPLLPELPSYYHTTNALPPHLNMTLRKALKMAKGTFSKILQNLKLDLVIYDALLQWAEKVCNSQGIPAVKLLTSGAAVYAYFVTLNKLPGNEFPFEAIYLRKLELEKLLELMAQSAKDKLPTDVFPFADANMQIMLMSTSRIIEAKYIDYFMKLSNWKVVPVGAPVQDMVMDDIDEKELIDWLGKKPTNSTVFVSFGSEYFLSKETLEEIAFGLELSGVNFIWVVRFPKGLEQNLIDALPPGFLERIGDRGRVLTKFAPQPRILSHPSTGGVISHCGWNSVMEAVDFGVPIIAMPQQLDQPMNARLIVELGVAVEIRRDDYGVIHRDEIAEIIRSVIHSKSGEKLKKNMRDIAENLKRIRDEEMDIAAEELRQLCKHLSKLK

SEQ ID NO: 493 - protein, 454 aa, Artificial Sequence
  engineered beta-1,2-glycosyltransferase encoded in plasmid pA33197
MGTEVTRHKSTLTVLMFPWLAQGHIGPFLRVARKLVDRGFVIYVQSTSVNLNSTAKKITEKYQPSIQLITLHMPELPELPSHLHTTNGLPPALNHTLQRALQLAKPNLSKILSNLRADLVISDALLQWSEQVANETGVPSVKLATSGAAVLAYFFEHNTKLGNEFPFEAINLRKSAKRKMSEALAQSAKDAESDDLFPFADANAQIMLMSTSRVIEAKYIDYLAKFANWQVVPVGTPVQDPIADDADEMELIDWLGKKDENSTVFVSFGSEYFLSKEDREEIAFGLELSNVNFIWVARFPKGEEQNLEDALPKGFLERIGDRGRVLDKFAPQPRILNHPSTGGFISHCGWNSVMESVDFGVPIIAMPIHLDQPMNARLIVELGVAVEIVRDDYGKIHREEIAEILKDVIAGKSGENLKAKMRDISKNLKSIRDEEMDTAAEELIQLCKNSPKLK

SEQ ID NO: 494 - protein, 454 aa, Artificial Sequence
  engineered beta-1,2-glycosyltransferase encoded in plasmid pA33198
MGTEVTVCKNTLKVTMFPWLAQGHIGPFLRVAKDLVDRGFLIYLQSTAINLKLTIKKITEKYSPSIQLIELHLPELPELPSHLHTTNGLPPHLNKTLQKALKMAKPNLSKISSDLKVTLVVYDFLLQWASGVANDQGIPAVKLATSGAAVLAYMFNLNKKPGHEFPFEAIYLRKLEKEKMSEALAQSAKDAERDGLFPFSDGNSQIMLMSTSRVIEAKYIDYLSKFANWKVVPVGTPVRDPAQSDADEKGLMDWLGKKDPHSTVFVSFGSEYFLSKRQREEIAFGLVLSNVNFIWVARFPKGAEQSLEDALPKGFLERAGDRGRVLTKFAPQLRILSHPSTGGFISHCGWNSVMEAVDAGVPIIAMPQHLDQPMNARLIVELGVAVEVRRPDGGKVHREELAQILRDVIQGKSGQNLKANMRDIAKLLKLIRDEEMDTAAEELLRLCKNSRKQK

SEQ ID NO: 495 - protein, 454 aa, Artificial Sequence
  engineered beta-1,2-glycosyltransferase encoded in plasmid pA33199
MGTEVTVHKNTLRVLMFPWLAYGHISPFLNVAKKLVDRGFLIYLCSTAINLKSTIKKIPEKYSDSIQLIELHLPELPELPPHYHTTNGLPPHLNHTLQKALKMSKPNFSKILQNLKPDLVIYDLLQQWAEGVANEQNIPAVKLLTSGAAVLSYFFNLVKKPGVEFPFPAIYLRKNELEKMSELLAQSAKDKEPDGVDPFADGNMQVMLMSTSRIIEAKYIDYFSGLSNWKVVPVGPPVLTMLALDADEKELMDWLGKKPPNSTVFVSFGSEYFLSKEQLEEIAWGLVLSNVNFIWVVRFPKGLEQNLIDALPPGFLERVGDRGRVLTRFAPQLRILNHKATGGFISHCGWNSVMEAVDAGVPIIAMPIQLDQPMNARLIVELGVAVEIRRRDGGVIPREEIAKIIKDVIQSKSGEKLKKNMADIAKLLKLIRDPEMDTAALALIQLCKHLRKLK

SEQ ID NO: 496 - protein, 454 aa, Artificial Sequence
  engineered beta-1,2-glycosyltransferase encoded in plasmid pA33200
MGTEVTVHKNTLKVLMFPWLAQGHISPFLRVAKDLVDRGFLIYVVSTNVNLKSTAKKITEKYQPSIQLIELHLPELPELPSYYHTTNALPPHLNKTLQKALKMAKPNFSKISQDLKIDLVIVDFLLQWAEQVANDQGIPSVGVATSGAAVLAYFFNLNKKPGHEFPFEAIYLRKSEKDKMTELLAQSAKDKLPDDLFPFADGNSQIMLMSTSRVIEAKYIDYLAKFSNWKVVPVGTPVQDAAADDAREKELIDWLGKKPPHSTVFVSFGSEYFLSKEQREEIAFGLVLSNVNFIWVARFPKGAEQNLEDALPRGFLDRIGDRGRVLTRFAPQPAVLSHPSTGGFISHCGWNSVMEAVDFGVPIIAMPQTLDQPMNARLIVELGVAVEVRRDDYGRVHREELAEILKDVIQSKSGENLKRNMRDLAKNLKRARDEEMDTAALELIQLCKNLSKLN

SEQ ID NO: 497 - protein, 454 aa, Artificial Sequence
  engineered beta-1,2-glycosyltransferase encoded in plasmid pA33201
MVTEVTVLKNTLRVLMFPWLALGHIGPFLRVAKDLVDRGFLIYLVSTNINLNLLIKKITYKYSPSIQLIELHLPELPELPSYLHTTNGLPPHLNMVLRKALKLAKGNYSKILSTLKITLVIYDLLLQWAEGVCLSQGIPAVKLLTFGAAVLAYMFNLNKLPGDEFLFEAIYLRKLELEKMLELLAQSAKDAESTGLFPFADGNMKAMLMSTSRIIEAKYIDYFSKLLNWKVVPVGAPVRDPVYLDADEKELMDWLGKKDPNSTVFVSFGSEYFLSKETREEIAFGLELSGVNFIWVARFPKGEEQTLIDALPKGFLERIGDRGRVLTKFAPQLRILNHPATGGFISHCGWNSVMEAVDAGVPIIAMPQQLDQPMNARLIVELGVAVEIRRDDYGKIHRDEIAKILRDVIFGKSGENLKKNMRDIAELLKRIRDEEMDIAAEELRRLCKNLRKLK

SEQ ID NO: 498 - protein, 454 aa, Artificial Sequence
  engineered beta-1,2-glycosyltransferase encoded in plasmid pA33202
MGTEVTVLKNTLRVTMFPWLAEGHIGPFLRVAKKLVDRGFLIYVQSTAVNLNSTAKKITEKYSPSIQLIELTLPLLPELPSHLHTTNGLPPALNHTLQRALKLAKPEYSKQLQDLSLDLVISDFLQQWSERVALDQGIPSVKLATSGAAVLAYMWNHNTKPGNEFPFEAIYLRKLALDKTSEAMAQSAKDKESDDLFPFADANSQVMLMSTSRVIEAKYIDYLAKLANWQVVPVGTPVQDPIADDADEMELIDWLGKKDENSTVFVSFGSEYFLSKEDREEIAFGLELSNVNFIWVARFPKGEEQNLEDALPKGFLERIGDRGRVLDKFAPQPRILNHPSTGGFISHCGWNSVMESVDFGVPIIAMPIHLDQPMNARLIVELGVAVEIVRDDYGKIHREEIAEILKDVIAGKSGENLKAKMRDISKNLKSIRDEEMDTAAEELIQLCKNSPKLK

SEQ ID NO: 499 - protein, 454 aa, Artificial Sequence
  engineered beta-1,2-glycosyltransferase encoded in plasmid pA33203
MGTSVTRLKNTLRVLMFPWQAQGHIGPFLNVAKDLVDRGFIIYVQSSAVNLNLTKKKITEKYQPSIQLIELHLPLLPELPPYLHTTNGLPPHLNHTLQKALQMSKPGLSKILSNLSADLVISDALLQWSEQVANETGIPAVKLLTSGAAVLAYMFNLNTKPGNEFPFPAIYLRKNELDKMQEALAQSAKDKERDDLFPFADQNSQVMLMSTSRVIEAKYIDYFAKFSNWQVVPVGAPVQDMVASDAHEKELMDWLGKKPPHSTVFVSFGSEYFLSKEDLEEIAFGLELSGANFIWVARFPKGAEQNLEDALPKGFLERIGDRGRVRTKFAPQARILSHPSTGGVISHCGWNSVMEAVDFGVPIIAMPQHLDQPMNARLIVELGVAVEISRDDYGKIHREEIAQIIRDVIASKSGENLKKNMRDLAKLLKSARDEEMDTAAEELRRLCKHSPKLK

SEQ ID NO: 500 - protein, 454 aa, Artificial Sequence
  engineered beta-1,2-glycosyltransferase encoded in plasmid pA33204
MGTEVTVLKNTLRVTMFPWLAEGHIGPFLRVAKKLVDRGFLISLQSTAINLNSTIKKITEKYSPSIQLIELTLPELPELPSHLHTTNGLPPHLNHTLQKALKLAKPELSKQLQDLKSDLVIYDALQQWAEGVALDQGVPAVKLATSGAAVLAYMWNVNTKPGNEFPFEAIYLRKLALEKTSEALAQSAKDAESDGLFPFADGNSQVMLMSTSRVIEAKYIDYLSKLANWKVVPVGTPVQTPTADDYDEKELMDWLGKKDPNSTVFVSFGSEYFLSKEDREEIAFGLELSGVPFIWVARFPKGLEQTLEDALPKGFLERIGDRGRVLTHFAPQLRILNHPSTGGFISHCGWNSVMEAVDAGVPIIAMPQHLDQPMNARLIVELGVAVEIRRDDEGKVTRDEIAQILRDVIMGKSGENLKKNMADIAKLLKAIRDPEMDTAAETLLALCKNSAKLN

SEQ ID NO: 501 - protein, 454 aa, Artificial Sequence
  engineered beta-1,2-glycosyltransferase encoded in plasmid pA33205
MGTEVTRHKNTLRVLMFPWLAQGHIGPFLRVAKKLVDRGFIIYVCSTSINLKSTAKKITEKYQDSIQLITLHMPELPELPPHLHTTNGLPPHLNHTLQRALQLAKPNFSKILSNLKIALVISDLLLQWSEQVANETNVPSVKLATSGAAVLAYMFELNTKLGVEFPFEAIYLRKSEKEKMSEALAQSAKDKESDGVFPFADANSQIMLMSTSRIIEAKYIDYLAGLANWQVVPVGPPVQDMIGLDIDEMELMDWLGKKPENSTVFVSFGSEAFLSKRTLEEIAWGLELSNVNFIWVARFPKGEEQSLEDALPKGFLDRAGDRGRVLDHFAPQQAVLNHPSTGGVISHCGWNSVMEAVDAGVPIIAMPITLDQPMNARLIVELGVAVEIRRDDAGSIHRDEIAKIVKDVIMSKSGENLKANMRDLSELLKRARDPEMDTAALELMKLCKNSPKLN

SEQ ID NO: 502 - protein, 454 aa, Artificial Sequence
  engineered beta-1,2-glycosyltransferase encoded in plasmid pA33206
MGTEVTVLKLTLTVLMFPWLALGHILPFLRLAKDLVDRGFIIYLLSTQINLNLTKKKITYKYVPLIQLIELTLPELPELPSYLWTTNALPPHLNMLLQRALKMAKGTLSKILSTLSIDLVIYDFLLQWASQVALEQGIPAVKLATSGAAVLAYFFNLNKLLGVEFLFEAIYLRKLALEKMLEAVAQSAKDKERTDVFPFADAYSNIMLMSTSRIIEAKYIDYLQKLANWKVVPVGAPVQDPIADDADEMELIDWLGKKDENSTVFVSFGSEYFLSKEDREEIAFGLELSNVNFIWVARFPKGEEQNLEDALPKGFLERIGDRGRVLDKFAPQPRILNHPSTGGFISHCGWNSVMESVDFGVPIIAMPIHLDQPMNARLIVELGVAVEIVRDDYGKIHREEIAEILKDVIAGKSGENLKAKMRDISKNLKSIRDEEMDTAAEELIQLCKNSPKLK

SEQ ID NO: 503 - protein, 454 aa, Artificial Sequence
  engineered beta-1,2-glycosyltransferase encoded in plasmid pA33207
MVTEVTVHKNTLRVLMFPWLALGHIGPFLRLAKKLVDRGFLIYLLSTNINLNLLKKKITEKYVPSIQLIELHLPLLPELPSYLWTTNALPPALNMTLRKALKLAKGTLSKILSTLKLTLVIYDLLLQWAEKVCLSQGIPAVKLLTFGAAVLAYMWNLNKLLGNEFLFEAIYLRKLELEKMLELLAQSAKDKERTDVFPFADFNMNAMLMSTSRIIEAKYIDYFMKLLNWQVVPVGAPVQDPIADDADEMELIDWLGKKDENSTVFVSFGSEYFLSKEDREEIAFGLELSNVNFIWVARFPKGEEQNLEDALPKGFLERIGDRGRVLDKFAPQPRILNHPSTGGFISHCGWNSVMESVDFGVPIIAMPIHLDQPMNARLIVELGVAVEIVRDDYGKIHREEIAEILKDVIAGKSGENLKAKMRDISKNLKSIRDEEMDTAAEELIQLCKNSPKLK

SEQ ID NO: 504 - protein, 454 aa, Artificial Sequence
  engineered beta-1,2-glycosyltransferase encoded in plasmid pA33208
MGTEVTVHKNTLRVLMFPWLAYGHISPFLNVAKKLVDRGFLIYLCSTAINLKSTIKKIPEKYSDSIQLIELHLPELPELPPHYHTTNGLPPHLNHTLQKALKMSKPNFSKILQNLKPDLVIYDLLQQWAEGVANEQNIPAVKLLTSGAAVLSYFFNLVKKPGVEFPFPAIYLRKNELEKMSELLAQSAKDKEPDGVDPFADGNMQVMLMSTSRIIEAKYIDYFSGLSNWKVVPVGPPVLDLVALDIDEKELMDWLGKKDPNSTVFVSFGSEYFLSKEDLEEIAFGLELSGVNFIWVARFPKGLEQRLEDALPNGFSDRIGDRGRVLTKFAPQLAVLNHPATGGFISHCGWNSVMEAVDAGVPIIAMPIHLDQPMNARLIVELGVAVEIVRDDEGRITREEIAKILRSVIQSKSGEKLKANMRDIAKALKAIRDEEMDTAAEELIKLCKHHLKLN

SEQ ID NO: 505 - protein, 454 aa, Artificial Sequence
  engineered beta-1,2-glycosyltransferase encoded in plasmid pA33209
MGTEVTVHKNTLRVLMFPWLAYGHISPFLNVAKKLVDRGFLIYLCSTAINLKSTIKKIPEKYSDSIQLIELHLPELPELPPHYHTTNGLPPHLNHTLQKALKMSKPNFSKILQNLKPDLVIYDLLQQWAEGVANEQNIPAVKLLTSGAAVLSYFFNLVKKPGVEFPFPAIYLRKNELEKMSELLAQSAKDKEPDGVDPFADGNMQVMLMSTSRIIEAKYIDYFSGLSNWKVVPVGPPVQTATADDIDEKELMDWLGKKPPNSTVFVSFGSEYFLSKEDLEEIAFGLELSGVNFIWVVRFPKGLEATLIDALPPGFLDRIGDRGRVVTHFAPQLRILNHPSTGGVISHCGWNSVMEAVDAGVPIIAMPQTLDQPMNARLIVELGVAVEVRRDDEGKVTRDEIAKITRDVIMSKSGENLKKNMADLAKLLKAARDPEMDTAAEALLQLCKKSAKAN

SEQ ID NO: 506 - protein, 454 aa, Artificial Sequence
  engineered beta-1,2-glycosyltransferase encoded in plasmid pA33210
MGTEVTVLKNTLRVTMFPWLAEGHIGPFLRVAKDLVDRGFVIYVCNTAVNLNSTAKKITEKYQDSIQLIELTLPLLPELPPHLHTTNGLPPHLNHTLQRALKLAKPTLSKILQDLKLDLVISDLLQQWSERVANDQNVPSVKLATSGAAVLAYMKNLNKKLGVEFPFEAIYLRKNALDKMSEALAQSAKDKESDDVFPFADANSQIMLMSTSRIIEAKYIDYLAGLANWQVVPVGPPVQTAIADDISEMELTDWLGKKPENSTVFVSFGSEYFLSKEDLEEIAFGLELSNVNFIWVVRFPKGEEQLLIDALPPGFLDRIGDRGRVVDHFAPQLAILNHPSTGGVISHCGWNSVMEAVDAGVPIIAMPITLDQPMNARLIVELGVAVEIRRDDEGKITRDEIAKITKDVIMSKSGENLKANMADLSKLLKAARDPEMDTAAEELLRLCKNSAKAN

SEQ ID NO: 507 - protein, 454 aa, Artificial Sequence
  engineered beta-1,2-glycosyltransferase encoded in plasmid pA33211
MGTEVTVHKNTLRVLMFPWLAYGHISPFLNVAKKLVDRGFLIYLCSTAINLKSTIKKIPEKYSDSIQLIELHLPELPELPPHYHTTNGLPPHLNHTLQKALKMSKPNFSKILQNLKPDLVIYDLLQQWAEGVANEQNIPAVKLLTSGAAVLSYFFNLVKKPGVEFPFPAIYLRKNELEKMSELLAQSAKDKEPDGVDPFADGNMQVMLMSTSRIIEAKYIDYFSGLSNWKVVPVGPPVRDAAFCDYDEKELIDWLGKKPPHSTVFVSFGSEYFLSKRTREEIAFGLELSGSNFIWVARFPKGEEQSLIDALPPGFTERAGDRGRVVTRFAPQARILSHKSTGGFISHCGWNSVMEAVDFGVPIIAMPILLDQPMNARLIVELGVAVEIRRRDGGSIPREEIAKIIRDVIHSKSGENLKKKMRDLAKNLKAARDEEMTTAAEELRRLCKNSRKFK

SEQ ID NO: 508 - protein, 454 aa, Artificial Sequence
  engineered beta-1,2-glycosyltransferase encoded in plasmid pA33212
MGTEVTVGKNSLRVLMFPWLAYGHIGPFLRVAKKLVDRGFLIYVQSTAVNLKSTAKKIPEAYGPSIHLWEYHLPELPELPPHLHTTNGLPPALNHTLQKALKMAKGNLSKVLSNLKPDLVISDFLQQWSEQVANDQGIPQVGLLTSGAAVLSYMWNLVKKLGREFLFPAIYLRKNEKDKMSEALAQSAKDKESDDLDPFADANMQAMLMSTSRVIEAKYIDYLAKLSNWQVVPVGTPVQDLVADDIREKELIDWLGKKPPNSTVFVSFGSEYFLSKEDREEIAFGLELSNVNFIWVARFPKGEEQTLEDALPKGFTERVGDRGRVLTKFAPQAAILSHPSTGGFISHCGWNSVMESVDFGVPIIAMPIHLDQPMNARLIVELGVAVEVVRDDLGRVHRDSLAKIIRDVIQSKSGENLKKKMADLAKLLKAARDEEMDTAAVALIKLCKNSPKFN

SEQ ID NO: 509 - protein, 454 aa, Artificial Sequence
  engineered beta-1,2-glycosyltransferase encoded in plasmid pA33213
MGTEVTVCKNTLRVLMFPWQAYGHINPFLRVAKKLVDRGFLIYVLSTKVNLKLTKKKIPEKYQPSIQLIELHLHLLPELPSHLHTTNGLPPALNHVLRKALKMAKPNLSKILSNLKPDLVISDFLQQWSSQVANEQGIPQVGLLTSGAAVLSYMFNLVKKPGFEFPFEAIRLRKNEKEKMSEALAQSAKDKEPDGLDPFADANMNIMLMSTSRVIEAKYIDYLQKLANWKVVPVGTPVRDASACDYDEKELIDWLGKKPPNSTVFVSFGSEYFLSKRTREEIAFGLELSNVNFIWVARFPKGEEQSLIDALPPGFTERAGDRGRVVTKFAPQLRILNHPSTGGFISHCGWNSVMESVDAGVPIIAMPIHLDQPMNARLIVELGVAVEIVRRDGGSIHREEIAKIIKDVISSKSGENLKRKMADLAKLLKAARDEEMTTAAEELIRLCKNSPKTN

SEQ ID NO: 510 - protein, 454 aa, Artificial Sequence
  engineered beta-1,2-glycosyltransferase encoded in plasmid pA33214
MGTEVTVMKNTLRVLMFPWLALGHILPFLRVAKKLVDRGFLIYLLSSAINLNSTIHKITYKYSCLIQLIELTLPELPELPPRLHTTNGLPPHLNMVLRKLLQLAKGTLSKILRNLKLTLVIYDALLQWASGVCNSQGIPSVKLLTSGAAVLAYFFNLNKLPGVEFPFEAINLRKLEKEKMLELLAQSAKDKESDGVFPFADGNMNIMLMSTSRVIEATYIDYFSKLLNWKVVPVGAPVQVPLYLDADEKELMDWLGKKDPNSTVFVSFGSEYFLSKEQREEIAWGLVLSNVNFIWVARFPKGLEQTLIDALPKGFLERVGDRGRVLTRFAPQLRILNHKATGGFISHCGWNSVMEAVDAGVPIIAMPIQLDQPMNARLIVELGVAVEIRRRDGGKITREEIAKILKDVIQGKSGENLKKNMADIAELLKRIRDPEMDTAAEALIQLCKNLPKLK

SEQ ID NO: 511 - protein, 454 aa, Artificial Sequence
  engineered beta-1,2-glycosyltransferase encoded in plasmid pA33215
MGTEVTVHKNTLRVLMFPWLAYGHISPFLNVAKKLVDRGFLIYLCSTAINLKSTIKKIPEKYSDSIQLIELHLPELPELPPHYHTTNGLPPHLNHTLQKALKMSKPNFSKILQNLKPDLVIYDLLQQWAEGVANEQNIPAVKLLTSGAAVLSYFFNLVKKPGVEFPFPAIYLRKNELEKMSELLAQSAKDKEPDGVDPFADGNMQVMLMSTSRIIEAKYIDYFSGLSNWKVVPVGPPVQDAAFCDYREKELIDWLGKKPPNSTVFVSFGSEAFLSKEQLEELAFGLELSGVNFIWVARFPKGLEQNLIDALPKGFLERVRDRGRVVTHFAPQPAVLSHKSTGGFISHCGWNSVMEAVDFGVPIIAMPQHLDQPMNARLIRELGVGVEISRDDEGAIHRDEIAKIVRDVIQSKSGENLKKNMADLAKLLKASRDPEMDCAAEALRQLCKNSSKLN

SEQ ID NO: 512 - protein, 454 aa, Artificial Sequence
  engineered beta-1,2-glycosyltransferase encoded in plasmid pA33216
MGTEVTVHKNTLRVLMFPWLAYGHISPFLNVAKKLVDRGFLIYLCSTAINLKSTIKKIPEKYSDSIQLIELHLPELPELPPHYHTTNGLPPHLNHTLQKALKMSKPNFSKILQNLKPDLVIYDLLQQWAEGVANEQNIPAVKLLTSGAAVLSYFFNLVKKPGVEFPFPAIYLRKNELEKMSELLAQSAKDKEPDGVDPFADGNMQVMLMSTSRIIEAKYIDYFSGLSNWKVVPVGPPVLDLVMDDIDEKELMDWLGKKPPNSTVFVSFGSEYFLSKEQLEEIAFGLVLSGLNFIWVVRFPKGLEQTLIDALPPGFLERIGDRGRVLTKFAPQLRILSHPATGGVISHCGWNSVMEAVDAGVPIIAMPIQLDQPMNARLIVELGVAVEVMRDDYGKITHEALARILRSVIQSPSGEKLKKRMADIAKLLKAIRDEEMDIAALELRLLCKHLPKLK

SEQ ID NO: 513 - protein, 454 aa, Artificial Sequence
  engineered beta-1,2-glycosyltransferase encoded in plasmid pA33217
MGTEVTVMKNTLRVLMFPWQAQGHIGPFLRVAKDLVDRGFLIYVCSTKINLKLTKKKITEKYQDLIQLIELTLHLLPELPPRLHTTNGLPPHLNAVLQKALKMAKPTLSKIVSNLKADLVISDLLLQWSEQVANDQNIPSVKLATSGAAVLAYMFNLNTLPGVEFPFEAIYLRKNEKDKMQEALAQSAKDKEPDGVFPFADANSNIMLMSTSRIIEAKYIDYLQGFANWKVVPVGPPVRDAIYCDYDEMELIDWLGKKPEHSTVFVSFGSEYFLSKRTREEIAFGLELSNSNFIWVARFPKGEEQSLEDALPPGFLERAGDRGRVLDRFAPQLRILNHKSTGGFISHCGWNSVMEAVDAGVPIIAMPILLDQPMNARLIVELGVAVEIRRRDGGSIPREEIAKIIKDVIHSKSGENLKAKMRDLSKNLKAARDEEMTTAAEELRRLCKNSRKTN

SEQ ID NO: 514 - protein, 454 aa, Artificial Sequence
  engineered beta-1,2-glycosyltransferase encoded in plasmid pA33218
MGTEVTVCKNLLTVLMFPWQAEGHIGPFLNVAKDLVDRGFAIYVQSTAVNLNSTAKKITEKYSPSIHLIEYALPELPELPPHLHTTNGLPPALNHTLQKALKLSKGELSKILSNLSADLVIYDFLLQWAEKVANEQGIPAVGLLTSGAAVLAYMFNLNKKLGREFLFPAIYLRKSELRKMQEALAQSAKDKESDDLDPFADQNAQVMLMSTSRVIEAKYIDYFAKFSNWKVVPVGAPVQDAVFDDADEKELMDWLGKKPPNSTVFVSFGSEYFLSKEDREEIAFGLELSNANFIWVARFPKGEEQTLEDALPKGFTERVGDRGRVLTHFAPQARILSHPSTGGFISHCGWNSVMEAVDFGVPIIAMPILLDQPMNARLIVELGVAVEVVRDDYGRVTREELARIIRDVIASKSGENLKKNMRDLAKLLKSARDPEMDTAAVELRKLCKNSAKFK

SEQ ID NO: 515 - protein, 454 aa, Artificial Sequence
  engineered beta-1,2-glycosyltransferase encoded in plasmid pA33219
MGTEVTVHKNTLRVLMFPWLAYGHISPFLNVAKKLVDRGFLIYLCSTAINLKSTIKKIPEKYSDSIQLIELHLPELPELPPHYHTTNGLPPHLNHTLQKALKMSKPNFSKILQNLKPDLVIYDLLQQWAEGVANEQNIPAVKLLTSGAAVLSYFFNLVKKPGVEFPFPAIYLRKNELEKMSELLAQSAKDKEPDGVDPFADGNMQVMLMSTSRIIEAKYIDYFSGLSNWKVVPVGPPVLTLIMLDYDEKELMDWLGKKPPNSTVFVSFGSEYFLSKEQLEEIAFGLVLSNVNFIWVVRFPKGLEQTLIDALPRGFLERIGDRGRVLTKFAPQLRILNHPATGGFISHCGWNSVMEAVDAGVPIIAMPQQLDQPMNARLIVELGVAVEVRRPDVGKIHREEIAKIIKDVIQSPSGEKLKKNMRDLAKLLKLARDEEMDTAALELILLCKHLPKLV

SEQ ID NO: 516 - protein, 454 aa, Artificial Sequence
  engineered beta-1,2-glycosyltransferase encoded in plasmid pA33220
MGTEVTRLKNTLRVLMFPWQAQGHIGPFLRVAKKLVDRGFDIYVLSTAINLNSTAKKITEKYVRSIQLIELALPELPELPSHLHTTNGLPPALNHTLRKALKLAKPNLSKIISNLKATLVIADFLLQWASQVANDQGIPQVKLLTSGAAVLAYMWNLNTKLGNEFLFEAISLRKLELRKMIEAMAQSAKDKESDDLFPFSDANAQAMLMSTSRVIEAKYIDYLAKLANWQVVPVGTPVQDPIADDADEMELIDWLGKKDENSTVFVSFGSEYFLSKEDREEIAFGLELSNVNFIWVARFPKGEEQNLEDALPKGFLERIGDRGRVLDKFAPQPRILNHPSTGGFISHCGWNSVMESVDFGVPIIAMPIHLDQPMNARLIVELGVAVEIVRDDYGKIHREEIAEILKDVIAGKSGENLKAKMRDISKNLKSIRDEEMDTAAEELIQLCKNSPKLK

SEQ ID NO: 517 - protein, 454 aa, Artificial Sequence
  engineered beta-1,2-glycosyltransferase encoded in plasmid pA33221
MGTEVTVHKNTLRVLMFPWLAYGHISPFLNVAKKLVDRGFLIYLCSTAINLKSTIKKIPEKYSDSIQLIELHLPELPELPPHYHTTNGLPPHLNHTLQKALKMSKPNFSKILQNLKPDLVIYDLLQQWAEGVANEQNIPAVKLLTSGAAVLSYFFNLVKKPGVEFPFPAIYLRKNELEKMSELLAQSAKDKEPDGVDPFADGNMQVMLMSTSRIIEAKYIDYFSGLSNWKVVPVGPPVQDAIFLDIDEKELMDWLGKKPPNSTVFVSFGSEYFLSKEQLEEIAFGLELSGVNFIWVVRFPKGAEQLLIDALPPGFLERIGDRGRVLTRFAPQLRILNHPATGGFISHCGWNSVMEAVDAGVPIIAMPQQLDQPMNARLIVELGVAVEISRDDYGVIHRDEIAKIIRDVIHSKSGEKLKKNMRDIAELLKRIRDEEMDIAADELRRLCKHLSKLK

SEQ ID NO: 518 - protein, 454 aa, Artificial Sequence
  engineered beta-1,2-glycosyltransferase encoded in plasmid pA33222
MGTEVTVHKPLLKVLMFPWLALGHILPFLRLAKKLVDRGFIIYLLNTKVNLNLTKKKITEKYVDLIQLIELHMPHLPELPSYLHTTNALPPHLNMTLQKALKLAKGTLSKILSDLKVALVIYDFLLQWASKVANSQGIPQVRLLTSGAAVLAYMWNLNTLPGVEFLFEAIYLRKLEKDKMLEALAQSAKDKERTDVFPFAVAYVNIMLMSTSRIIEAKYIDYFMKFTNWKVVPVGAPVQDPIADDADEMELIDWLGKKDENSTVFVSFGSEYFLSKEDREEIAFGLELSNVNFIWVARFPKGEEQNLEDALPKGFLERIGDRGRVLDKFAPQPRILNHPSTGGFISHCGWNSVMESVDFGVPIIAMPIHLDQPMNARLIVELGVAVEIVRDDYGKIHREEIAEILKDVIAGKSGENLKAKMRDISKNLKSIRDEEMDTAAEELIQLCKNSPKLK

SEQ ID NO: 519 - protein, 454 aa, Artificial Sequence
  engineered beta-1,2-glycosyltransferase encoded in plasmid pA33223
MVTEVTRHKLTLRVLMFPWLALGHIGPFLRLAKKLVDRGFIIYLLNTQINLNLTKKKITEKYVDLIQLIELRLHLLPELPSYLWTTNALPPALNMVLRKALKMAKGTLSKILSTLSVDLVIYDFLLQWASQVANEQGIPAVKLLTSGAAVLAYMWNLNKLLGNEFLFEAISLRKLELEKMLELLAQSAKDKERTDVFPFMVAYANVMLMSTSRVIEAKYIDYLMKLANWKVVPVGAPVQDPIADDADEMELIDWLGKKDENSTVFVSFGSEYFLSKEDREEIAFGLELSNVNFIWVARFPKGEEQNLEDALPKGFLERIGDRGRVLDKFAPQPRILNHPSTGGFISHCGWNSVMESVDFGVPIIAMPIHLDQPMNARLIVELGVAVEIVRDDYGKIHREEIAEILKDVIAGKSGENLKAKMRDISKNLKSIRDEEMDTAAEELIQLCKNSPKLK

SEQ ID NO: 520 - protein, 454 aa, Artificial Sequence
  engineered beta-1,2-glycosyltransferase encoded in plasmid pA33224
MGTEVTVLKLSLTVLMFPWLAYGHILPFLCLAKKLVDRGFLIYLLSTAINLNLTKKKITNKYLFSIQLWESVLPELPELPSHLHTTNALPPHLNMVLRKLLQMAKGTLSKILQNLSLTLVIVDFLLQWASKVANSQGIPSVRLLTFGAAVLAYFWNLNKLPGVEFLFPAIYLRKLEKEKMLEALAQSAKDKESTDLFPFAVQYVNVMLMSTSRIIEAKYIDYLMKLLNWKVVPVGAPVQDPIADDADEMELIDWLGKKDENSTVFVSFGSEYFLSKEDREEIAFGLELSNVNFIWVARFPKGEEQNLEDALPKGFLERIGDRGRVLDKFAPQPRILNHPSTGGFISHCGWNSVMESVDFGVPIIAMPIHLDQPMNARLIVELGVAVEIVRDDYGKIHREEIAEILKDVIAGKSGENLKAKMRDISKNLKSIRDEEMDTAAEELIQLCKNSPKLK

SEQ ID NO: 521 - protein, 454 aa, Artificial Sequence
  engineered beta-1,2-glycosyltransferase encoded in plasmid pA33225
MGTEVTVHKNTLRVLMFPWLAYGHISPFLNVAKKLVDRGFLIYLCSTAINLKSTIKKIPEKYSDSIQLIELHLPELPELPPHYHTTNGLPPHLNHTLQKALKMSKPNFSKILQNLKPDLVIYDLLQQWAEGVANEQNIPAVKLLTSGAAVLSYFFNLVKKPGVEFPFPAIYLRKNELEKMSELLAQSAKDKEPDGVDPFADGNMQVMLMSTSRIIEAKYIDYFSGLSNWKVVPVGPPVQDMVALDIDEKELMDWLGKKPPNSTVFVSFGSEYFLSKEDLEEIAWGLVLSGVPFIWVVRFPKGLEQTLEDALPPGFLERIRDRGRVLTKFAPQLRILNHPATGGVISHCGWNSVMEAVDAGVPIIAMPQQLDQPMNARLIVELGVAVEIRRDDEGKITRDEIVKILRDVIMSPSGEKLKKRMADLAKLLKLIRDPEMTTAAETLLKLCKNLVKLN

SEQ ID NO: 522 - protein, 454 aa, Artificial Sequence
  engineered beta-1,2-glycosyltransferase encoded in plasmid pA33226
MGTEVTVMKNTLRVLMFPWLAYGHILPFLRLAKKLVDRGFLIYLLSTAINLKLTAHKIPYKYFCSIQLIELHLPELPELPSHLHTTNALPPHLNHVLRKALKLAAPNLSKILRNLKPTLVIYDFLQQWASKVANSQGIPAVGLLTSGAAVLSYMWNLVDLLGVEFLFEAIYLRKNEKEKMSELLAQSAKDKERDGVDPFAVAYMNIMLMSTSRVIEATYIDYFQKLLNWQVVPVGAPVLDMLALDYDEKELMDWLGKKPTNSTVFVSFGSEYFLSKEQLEEIAFGLVLSNVNFIWVVRFPKGLEQTLIDALPPGFLERVGDRGRVLTKFAPQLRILNHPATGGFISHCGWNSVMESVDAGVPIIAMPIHLDQPMNARLIVELGVAVEIVRRDGGVIHREEIAKIIKDVIQSKSGEKLKKKMADLAKLLKLIRDEEMDVAALALIKLCKNLPKLK

SEQ ID NO: 523 - protein, 454 aa, Artificial Sequence
  engineered beta-1,2-glycosyltransferase encoded in plasmid pA33227
MITEVTRHKNLLRVLMFPWLALGHILPFLRLAKKLVDRGFIIYLLSTSVNLNLTKKKITEKYLRLIQLIELHLPELPELPSYLWTTNALPPHLNMVLQRALKMAKGTLSKILQNLRLTLVIVDLLLQWAEKVALETGTPSVKLLTSGAAVLAYMWTVNKLLGDEFLFEAIYLRKLELEKLSELLAQSAKDKERTDAFPFAVAYSNIMLMSTSRLIEATYIDYLMKFANWKVVPVGAPVQDPIADDADEMELIDWLGKKDENSTVFVSFGSEYFLSKEDREEIAFGLELSNVNFIWVARFPKGEEQNLEDALPKGFLERIGDRGRVLDKFAPQPRILNHPSTGGFISHCGWNSVMESVDFGVPIIAMPIHLDQPMNARLIVELGVAVEIVRDDYGKIHREEIAEILKDVIAGKSGENLKAKMRDISKNLKSIRDEEMDTAAEELIQLCKNSPKLK

SEQ ID NO: 524 - protein, 454 aa, Artificial Sequence
  engineered beta-1,2-glycosyltransferase encoded in plasmid pA33228
MGTEVTVHKNTLRVLMFPWLAYGHISPFLNVAKKLVDRGFLIYLCSTAINLKSTIKKIPEKYSDSIQLIELHLPELPELPPHYHTTNGLPPHLNHTLQKALKMSKPNFSKILQNLKPDLVIYDLLQQWAEGVANEQNIPAVKLLTSGAAVLSYFFNLVKKPGVEFPFPAIYLRKNELEKMSELLAQSAKDKEPDGVDPFADGNMQVMLMSTSRIIEAKYIDYFSGLSNWKVVPVGPPVQDAVACDYDEKELIDWLGKKPPNSTVFVSFGSESFLSKEQLEEIAFGLELSGSNFIWVARFPKGLEQTLIDALPPGFLERIGDRGRVVTHFAPQPRILSHPSTGGVISHCGWNSVMEAVDFGVPIIAMPQHLDQPMNARLIVELGVAVEVRRDDLGVIHRSEAAKIIRDVIHSKSGENLKANMRDLAENLKRARDEEMDTAAEELRQLCKNSAKAN

SEQ ID NO: 525 - protein, 454 aa, Artificial Sequence
  engineered beta-1,2-glycosyltransferase encoded in plasmid pA33229
MGTEVTVCKNTLRVLMFPWLAYGHIGPFLRVAKKLVDRGFLIYVVSTNVNLKLTKKKIPEKYQPSIQLIELHLPHLPELPSHLHTTNALPPHLNHTLQKALKMAKPNYSKILSDLKPTLVIVDFLQQWAEQVANDQGIPSVGLLTAGAAVLSYMFNWVKKPGHEFPFEAIYLRKNEKDKMSEALAQSAKDAESDDLDPFAVGNMQIMLMSTSRVIEAKYIDYLAKLANWKVVPVGTPVQDLAACDLREKELMDWLGKKPPNSTVFVSFGSEYFLSKRQREEIAFGLVLSNVNFIWVARFPKGAEQSLEDALPRGFLERAGDRGRVLTKFAPQLAVLSHPSTGGFISHCGWNSVMESVDAGVPIIAMPQHLDQPMNARLIVELGVAVEVVRPDYGRVHRDELAQIIRDVIQSKSGQNLKAKMADLAKLLKLARDEEMDTAALELIQLCKNSPKQK

SEQ ID NO: 526 - protein, 454 aa, Artificial Sequence
  engineered beta-1,2-glycosyltransferase encoded in plasmid pA33230
MGTEVTVHKNTLRVLMFPWLAYGHISPFLNVAKKLVDRGFLIYLCSTAINLKSTIKKIPEKYSDSIQLIELHLPELPELPPHYHTTNGLPPHLNHTLQKALKMSKPNFSKILQNLKPDLVIYDLLQQWAEGVANEQNIPAVKLLTSGAAVLSYFFNLVKKPGVEFPFPAIYLRKNELEKMSELLAQSAKDKEPDGVDPFADGNMQVMLMSTSRIIEAKYIDYFSGLSNWKVVPVGPPVQTLSQCDLREKELMDWLGKKPPHSTVFVSFGSEYFLSKRQREEIAFGLVLSNVNFIWVARFPKGEEQSLEDALPRGFLERAGDRGRVLTKFAPQQAVLSHPSTGGFISHCGWNSVMEAVDAGVPIIAMPQTLDQPMNARLIVELGVAVEVRRPDYGRVHREELAQILRDVIQSKSGQNLKANMRDLAKLLKLARDEEMDTAALELIQLCKNSRKFN

SEQ ID NO: 527 - protein, 454 aa, Artificial Sequence
  engineered beta-1,2-glycosyltransferase encoded in plasmid pA33231
MGTEVTVCKNTLKVTMFPWLAQGHIGPFLRVAKDLVDRGFLIYVQSTNVNLKLTKKKITEKYQPSIQLIELHLPHLPELPSHLHTTNALPPHLNHTLQKALKMAKPNLSKISSDLKVTLVIADFLLQWASQVANDQGIPQVKLATSGAAVLAYMFNLNKKPGHEFPFEAIYLRKLEKDKMTEALAQSAKDRERDDLFPFSDANSQIMLMSTSREIEAKYIDYLAKFANWKVVPVGTPVQDPIADDADEMELIDWLGKKDENSTVFVSFGSEYFLSKEDREEIAFGLELSNVNFIWVARFPKGEEQNLEDALPKGFLERIGDRGRVLDKFAPQPRILNHPSTGGFISHCGWNSVMESVDFGVPIIAMPIHLDQPMNARLIVELGVAVEIVRDDYGKIHREEIAEILKDVIAGKSGENLKAKMRDISKNLKSIRDEEMDTAAEELIQLCKNSPKLK

SEQ ID NO: 528 - protein, 454 aa, Artificial Sequence
  engineered beta-1,2-glycosyltransferase encoded in plasmid pA33232
MGTEVTVHKNTLRVLMFPWLAYGHISPFLNVAKKLVDRGFLIYLCSTAINLKSTIKKIPEKYSDSIQLIELHLPELPELPPHYHTTNGLPPHLNHTLQKALKMSKPNFSKILQNLKPDLVIYDLLQQWAEGVANEQNIPAVKLLTSGAAVLSYFFNLVKKPGVEFPFPAIYLRKNELEKMSELLAQSAKDKEPDGVDPFADGNMQVMLMSTSRIIEAKYIDYFSGLSNWKVVPVGPPVLDAVQSDYDEKELMDWLGKKPPNSTVFVSFGSEAFLSKEDLEEIAFGLELSGVNFIWVARFPKGAEANLIDALPKGFLERIGDRGRVVTKFAPQPRILSHPSTGGVISHCGWNSVMEAVDFGVPIIAMPQTLDQPMNARLIVELGVGVEVSRDDLGKVHRESLAKILRDVIHSKSGENLKANSRDIAKLLKAARDEEMTTAAEELRRLCKHLPKLN

SEQ ID NO: 529 - protein, 454 aa, Artificial Sequence
  engineered beta-1,2-glycosyltransferase encoded in plasmid pA33233
MGTEVTVGKNTLRVLMFPWQAYGHIGPFLRVAKKLVDRGFLIYVVSTAVNLKSTAKKIPEKYQPSIQLITLHLPLLPELPSHLHTTNGLPPALNHTLQKALKMAKPNFSKILSTLKPTLVIVDFLQQWAEQSANEQGIPSVGLLTSGAAVLSYMKNLVKKPGQEFLFEAISLRKNALDKMSEAMAQSAKDKESDDLDPFADANMQAMLMSTSRVIEAKYIDYLAKLSNWQVVPVGTPVQTAVALDYDEKELIDWLGKKPPNSTVFVSFGSESFLSKEQLEEIAFGLELSGVNFIWVARFPKGLEQTLIDALPPGFLERIGDRGRVVTKFAPQPRILSHPSTGGVISHCGWNSVMESVDFGVPIIAMPQHLDQPMNARLIVELGVAVEIVRDDLGVIHRSEIAQILRDVIQSKSGENLKAKMRDLAKLLKLARDEEMDTAADELIQLCKNSPKAN

SEQ ID NO: 530 - protein, 454 aa, Artificial Sequence
  engineered beta-1,2-glycosyltransferase encoded in plasmid pA33234
MGTEVTRHKNTLRVTMFPWLAQGHIGPFLRVAKKLVDRGFIIYLQSTSINLKSTIKKITEKYSPSIQLIELHMPELPELPSHLHTTNGLPPALNHTLQKALQLAKPNLSKILSNLRIALVIYDALLQWAEGVANEQGIPAVKLATSGAAVLAYFFNHNTKPGNEFPFEAINLRKSAKEKMSEALAQSAKDRESDGLFPFADGNAQIMLMSTSRVIEAKYIDYLSKFANWKVVPVGTPVQDPVACDIDEKELIDWLGKKDPNSTVFVSFGSEYFLSKETREEIAWGLELSGVNFIWVARFPKGAEQSLEDALPKGFSDRAGDRGRVLTHFAPQLAILNHPSTGGFISHCGWNSVMEAVDAGVPIIAMPQTLDQPMNARLIVELGVAVEIRRDDEGKIHRDEIAKILRDVIMGKSGENLKKNMADIAELLKRIRDPEMTTAAEELLRLCKNSPKLK

SEQ ID NO: 531 - protein, 454 aa, Artificial Sequence
  engineered beta-1,2-glycosyltransferase encoded in plasmid pA33235
MGTEVTVHKNTLRVLMFPWLAYGHISPFLNVAKKLVDRGFLIYLCSTAINLKSTIKKIPEKYSDSIQLIELHLPELPELPPHYHTTNGLPPHLNHTLQKALKMSKPNFSKILQNLKPDLVIYDLLQQWAEGVANEQNIPAVKLLTSGAAVLSYFFNLVKKPGVEFPFPAIYLRKNELEKMSELLAQSAKDKEPDGVDPFADGNMQVMLMSTSRIIEAKYIDYFSGLSNWKVVPVGPPVQDAVALDIDETELMDWLGKKPPNSTVFVSFGSEYFLSKETLEEIAWGLELSGVNFIWVARFPKGAEQSLEDALPKGFSDRAGDRGRVLTHFAPQARVLSHPSTGGVISHCGWNSVMEAVDFGVPIIAMPQTLDQPMNARLIVELGVAVEIRRDDEGKIHRDEIAKIVRDVIMSKSGENLKANMRDLAELLKRARDPEMTTAALELMKLCKNSPKLK

SEQ ID NO: 532 - protein, 454 aa, Artificial Sequence
  engineered beta-1,2-glycosyltransferase encoded in plasmid pA33236
MGTEVTVLKNTLRVLMFPWQAQGHIGPFLRVAKKLVDRGFLIYVQSTKINLNLTKKKITEKYQPSIQLITLTLHLLPELPSRLHTTNGLPPALNHVLQKALKMAKPNLSKQVSNLKADLVIYDALLQWAEQVANDQGIPAVGLATSGAAVLAYMFNWNTLPGNEFPFEAIRLRKSEKDKLQEAMAQSAKDKVRDGLDPFADANSNIMLMSTSRIIEAKYIDYLQKFANWKVVPVGTPVQDPIADDADEMELIDWLGKKDENSTVFVSFGSEYFLSKEDREEIAFGLELSNVNFIWVARFPKGEEQNLEDALPKGFLERIGDRGRVLDKFAPQPRILNHPSTGGFISHCGWNSVMESVDFGVPIIAMPIHLDQPMNARLIVELGVAVEIVRDDYGKIHREEIAEILKDVIAGKSGENLKAKMRDISKNLKSIRDEEMDTAAEELIQLCKNSPKLK

SEQ ID NO: 533 - protein, 454 aa, Artificial Sequence
  engineered beta-1,2-glycosyltransferase encoded in plasmid pA33237
MGTEVTVMKDLLRLLMFPWLALGHIGPFLRVAKDLVDRGFLIELLSTMVNLNLTKKKITYKYQPLIILIEVPLPLLPELPSYLWTTNALPPALNMVLQRALKLAAPTLSKILSTIRLTLVIYDFLLQWAEQVANSQGIPAVKLLTSGAAVLAYFFNLNKLPGVEFLFEAIYLRKLELAKMQELLAQSAKDKERTDLFPFAVANMQVMLMSTSRVIEAKYIDYLMKLLNWKVVPVGAPVQDPIADDADEMELIDWLGKKDENSTVFVSFGSEYFLSKEDREEIAFGLELSNVNFIWVARFPKGEEQNLEDALPKGFLERIGDRGRVLDKFAPQPRILNHPSTGGFISHCGWNSVMESVDFGVPIIAMPIHLDQPMNARLIVELGVAVEIVRDDYGKIHREEIAEILKDVIAGKSGENLKAKMRDISKNLKSIRDEEMDTAAEELIQLCKNSPKLK

SEQ ID NO: 534 - protein, 454 aa, Artificial Sequence
  engineered beta-1,2-glycosyltransferase encoded in plasmid pA33238
MGTEVTVGKNTLRVLMFPWQAQGHIGPFLNVAKDLVDRGFVIYVQSTAVNLNSTAKKITEKYQPSIQLITLALPLLPELPSHLHTTNGLPPALNHTLQKALKMSKPELSKILSNLKSTLVISDFLLQWSEQSANETGIPAVKLLTSGAAVLAYMFNLNKKPGQEFLFPAISLRKNELDKMSEALAQSAKDKERDDLFPFSDANSQVMLMSTSRVIEAKYIDYFAKLSNWQVVPVGAPVRDAVADDADEKELIDWLGKKPPNSTVFVSFGSEYFLSKEDLEEIAFGLELSGSNFIWVARFPKGLEQTLEDALPPGFLERIGDRGRVVTHFAPQPRILSHPSTGGVISHCGWNSVMEAVDFGVPIIAMPQHLDQPMNARLIVELGVAVEIRRDDYGRVHREEAAQIIRDVIASKSGENLKANMRDLAKLLKSARDEEMDTAAEELRQLCKNSAKAK

SEQ ID NO: 535 - protein, 440 aa, Artificial Sequence
  engineered beta-1,2-glycosyltransferase encoded in plasmid pA29767
QTFRVLMFPWLALGHVNPFLRIAKQLADRGFHIYLVSTAINLESIKKRIPEKYSNSIHLVELALPELPELPPHYHTTNGLPPHLNGILHKALKMSQPNFSKILQNLKPDLVLYDFLQPWAEKVALEQGIPAVPLLTSGAALFSYFFHFLKRPGHEFPFPAIELSKREQDKMREMFGTEPTEEDFLAPGNAQIMLMMTSRVIEAKYLDYCSELTNVKVVPVGPPFQDPLTEDDDDPELIKWLDKKPENSVVYVSFGSEYFLSREDMEEVAHGLELSNVNFIWVVRFPKGEEINLEDVLPKGFLERVGDRGRVLDHLVPQAHILNHPSVGGFISHCGWNSVMESIDFGVPIIAMPMQWDQPINARLLVELGVAVEIRRDEDGRIHREEIAQVIKDVISGPTGEILRRKVRDISKRLREKREEEMDAAAEELIQLCRNRNAYK

SEQ ID NO: 536 - protein, 440 aa, Artificial Sequence
  engineered beta-1,2-glycosyltransferase encoded in plasmid pA29768
QTLRVLMFPWLALGHVNPFLRIAKQLADRNFVIYLVSTAINLKSIKKRIPEKYSNSIHLVELALPYLPELPPHYHTTNGLPPHLNGTLIKALDMSAPNFSKILQNLKPDLVIYDFLQPWAEKVALEQGIPAVPLLTSGAALFSYFFHFLKRPGHEFPFPAIELSKREQDKMREMFGKEPTEEDFLAPGNAGIMLMCTSRVIEAKYLDYCSELTNVKVVPVGPPVQDPLTEDIDNPELIDWLDKKPENSVVYVSFGSEYFLSREDMEEIAFGLELSNVNFIWVIRFPKGEEQNLEDVLPKGFLERVGDRGRVLDHLVPQAHILNHPSTGGFISHCGWNSVMESLYFGVPIIAMPMQWDQPINARLLVELGVAVEIVRDEDGRIHREEIAQVLKDVITGPTGEILRRKAREISKKLRARREEEMQAAMEELIQLCRNRNAYK

SEQ ID NO: 537 - protein, 440 aa, Artificial Sequence
  engineered beta-1,2-glycosyltransferase encoded in plasmid pA29769
QTLHVLMFPWLALGHVNPFLRIAKQLADRNFVIYLVSTAINLKSIKKRIPEKYSNSIHLVELALPELPELPPHYHTTNGLPPHLNGTLIKALKMSAPNFSKILQNLKPDLVIYDFLQPWAEKVALEQGIPAVPLLTSGAALFSYFFNFLKRPGHEFPFPAIELSKREQDKMREMFGKEPTEEDFLAPGNAGIMLMCTSRVIEAKYLDYCTELTNVKVVPVGPPFQDPLTEDIDDPELIDWLDKKPENSVVYVSFGSEYFLSREDMEEVAFGLELSNVNFIWVVRFPKGEEQNLEDVLPKGFLERVGDRGRVLDHLVPQAHILNHPSTGGFISHCGWNSVMESLYFGVPIIAMPMQWDQPINARLLVELGVAVEIVRDEDGRIHREEIAQVLKDVIFGPTGEILRRKVREISKKLRARREEEMNAAMEELIQLCRNRNAYK

SEQ ID NO: 538 - protein, 440 aa, Artificial Sequence
  engineered beta-1,2-glycosyltransferase encoded in plasmid pA29770
QTLRVLMFPWLALGHVNPFLRIAKQLADRNFVIYLVSTAINLESIKKRIPKKYSNSIHLVELALPELPELPPHYHTTNGLPPHLNGTLIKALKMSAPNFSKILQNLKPDLVIYDFLQPWAEKVALEQGIPAVPLLTSGAALFSYFFNFLKRPGHEFPFPAIELSKREQDKMREMFGKEPTEEDFLAPGNAGIMLMCTSRVIEAKYLDYCTELTNVKVVPVGPPFQDPLTEDIDDPELIDWLDKKPENSVVYVSFGSEYFLSREDMEEVAFGLELSNVNFIWVVRFPKGEEQNLEDVLPKGFLERVGDRGRVLDHLVPQAHILNHPSTGGFISHCGWNSVMESLDFGVPIIAMPMQWDQPINARLLVELGVAVEIVRDEDGRIHREEIAQVLKDVIFGPTGEILRRKVREISKKLRARREEEMQAAMEELIQLCRNRNAYK

SEQ ID NO: 539 - protein, 440 aa, Artificial Sequence
  engineered beta-1,2-glycosyltransferase encoded in plasmid pA29771
QTLRVLMFPWLALGHVNPFLRIAKQLADRNFVIYLVSTAINLKSIKKRIPEKYSNSIHLVELALPELPELPPHYHTTNGLPPHLNGTLIKALKMSAPNFSKILQNLKPDLVIYDFLQPWAEKVALEQGIPAVPLLTSGAALFSYFFNFLKRPGHEFPFPAIELSKREQDKMREMFGKEPTEEDFLAPGNAGIMLMCTSRVIEAKYLDYCTELTNVKVVPVGPPFQDPLTEDIDDPELIDWLDKKPENSVVYVSFGSEYFLSREDMEEVAFGLELSNVNFIWVVRFPKGEEQNLEDVLPKGFLERVGDRGRVLDHLVPQAHILNHPSTGGFISHCGWNSVMESLDFGVPIIAMPMQWDQPINARLLVELGVAVEIVRDEDGRIHREEIAQVLKDVIFGPTGEILRRKVREISKKLRARREEEMQAAMEELIQLCRNRNAYK

SEQ ID NO: 540 - protein, 440 aa, Artificial Sequence
  engineered beta-1,2-glycosyltransferase encoded in plasmid pA29772
QTLRVLMFPWLALGHVNPFLRIAKQLADRNFVIYLVSTAINLKSIKKRIPEKYSNSIHLVELALPELPELPPHYHTTNGLPPHLNGTLIKALKMSAPNFSKILQNLKPDLVIYDFLQPWAEKVALEQGIPAVPLLTSGAALFSYFFNFLKRPGHEFPFPAIELSKREQDKMREMFGKEPTEEDFLAPGNAGIMLMCTSRVIEAKYLDYCTELTNVKVVPVGPPVQDPLTEDIDDPELIDWLDKKPENSVVYVSFGSEYFLSREDMEEVAFGLELSNVNFIWVIRFPKGEEQNLEDVLPKGFLERVGDRGRVLDHLVPQAHILNHPSTGGFISHCGWNSVMESLYFGVPIIAMPMQWDQPINARLLVELGVAVEIVRDEDGRIHREEIAQVLKDVIFGPTGEILRRKVREISKKLRARREEEMQAAMEELIQLCRNRNAYK

SEQ ID NO: 541 - protein, 440 aa, Artificial Sequence
  engineered beta-1,2-glycosyltransferase encoded in plasmid pA29773
QTLRVLMFPWLALGHVNPFLRIAKQLADRNFVIYLVSTAINLESIKKRIPKKYSNSIHLVELALPELPELPPHYHTTNGLPPHLNGTLIKALKMSAPNFSKILQNLKPDLVIYDFLQPWAEKVALEQGIPAVPLLTSGAALFSYFFNFLKRPGHEFPFPAIELSKREQDKMREMFGKEPTEEDFLAPGNAGIMLMCTSRVIEAKYLDYCTELTNVKVVPVGPPVQDPLTEDIDDPELIDWLDKKPENSVVYVSFGSEYFLSREDMEEVAFGLELSNVNFIWVVRFPKGEEQNLEDVLPKGFLERVGDRGRVLDHLVPQAHILNHPSTGGFISHCGWNSVMESLYFGVPIIAMPMQWDQPINARLLVELGVAVEIVRDEDGRIHREEIAQVLKDVIFGPTGEILRRKVREISKKLRARREEEMNAAAEELIQLCRNRNAYK

SEQ ID NO: 542 - protein, 440 aa, Artificial Sequence
  engineered beta-1,2-glycosyltransferase encoded in plasmid pA29774
QTFRVLMFPWLALGHVNPFLRIAKQLADRGFHIYLVSTAINLESIKKRIPEKYSNSIHLVELALPELPELPPHYHTTNGLPPHLNGILHKALKMSAPNFSKILQNLKPDLVLYDFLQPWAEKVALEQGIPAVPLLTSGAALFSYFFHFLKRPGHEFPFPAIELSKREQDKMREMFGTEPTEEDFLAPGNAQIMLMMTSRVIEAKYLDYCSELTNVKVVPVGPPFQDPLTEDDDDPELIKWLDKKPENSVVYVSFGSEYFLSREDMEEVAHGLELSNVNFIWVARFPKGEEINLEDVLPKGFLERVGDRGRVLDHLVPQAHILNHPSVGGFISHCGWNSVMESIDFGVPIIAMPMQWDQPINARLLVELGVAVEIRRDEDGRIHREEIAQVIKDVISGPTGEILRRKVRDISKRLREKREEEMDAAAEELIQLCRNRNAYK

SEQ ID NO: 543 - protein, 440 aa, Artificial Sequence
  engineered beta-1,2-glycosyltransferase encoded in plasmid pA29775
QTFRVLMFPWLALGHVNPFLRIAKQLADRGFHIYLVSTAINLESIKKRIPEKYSNSIHLVELALPELPELPPHYHTTNGLPPHLNGILHKALKMSQPNFSKILQNLKPDLVLYDFLQPWAEKVALEQGIPAVPLLTSGAALFSYFFHFLKRPGHEFPFPAIELSKREQDKMREMFGTEPTEEDFLAPGNAQIMLMMTSRVIEAKYLDYCSELTNVKVVPVGPPFQDPLTEDDDDPELIKWLDKKPENSVVYVSFGSEYFLSREDMEEVAHGLELSNVNFIWVARFPKGEEINLEDVLPKGFLERVGDRGRVLDHLVPQAHILNHPSVGGFISHCGWNSVMESIDFGVPIIAMPMQWDQPINARLLVELGVAVEIRRDEDGRIHREEIAQVIKDVISGPTGEILRRKVRDISKRLREKREEEMDAAAEELIQLCRNRNAYK

SEQ ID NO: 544 - protein, 440 aa, Artificial Sequence
  engineered beta-1,2-glycosyltransferase encoded in plasmid pA29776
QTFRVLMFPWLALGHVNPFLRIAKQLADRNFHIYLVSTAINLKSIKKRIPEKYSNSIQLVELALPELPELPPHYHTTNGLPPHLNGILIKALDMSAPNFSKILQNLKPDLVIYDFLQPWAEKVALEQGIPAVPLLTSGAALFSYFFHFLKKPGHEFPFPAIYLSKWEQEKMREMFGKEPTEKDFLAPGNAGIMLMCTSRVIEAKYLDYCSELTNVKVVPVGPPVQDPNTEDIDNPELIKWLDKKPPNSVVYVSFGSEYFLSREDMEEIAHGLELSNVNFIWVIRFPKGEEQALEDVLPKGFLERVGDRGRVLDHLVPQAHILNHPSTGGFISHCGWNSVMESLYFGVPIIAMPMQWDQPINARLLVELGVAVEIRRDEDGRIHREEIARVLKDVITGPTGEKLRRKAREISKKLRARRNEEMQKAMEELIQLCRNRNAYK

SEQ ID NO: 545 - protein, 440 aa, Artificial Sequence
  engineered beta-1,2-glycosyltransferase encoded in plasmid pA29777
QTLRVLMFPWLALGHVNPFLRIAKQLADRGFVIYVVSTAINLESIKKRIPEKYSNSIHLVELHLPELPELPPHYHTTNGLPPHLNGILHQALKMSAPNFSKILQNLKPDLVLYDFLQPWAEKVALEQGIPAVPLLTSGAALFSYFFHFLKRPGHEFPFPAIDLSKWEQDKFREMFGTEPTEEDFLAPGNAGIMLMCTSREIEAKYLDYCTELTNVKVVPVGPPFQDPLTEDDDDPELIDWLDKKPENSVVYVSFGSEYFLSREDMEEVAFGLELSNVNFIWVARFPKGEEQNLEDVLPKGFLERVGDRGRVLDHLVPQAHILNHPSTGGFISHCGWNSVMESIYFGVPIIAMPMQWDQPINARLLVELGVAVEIRRDEDGRIHREEIAQVLKDVITGPTGEILRRKVRDISKRLRERREEEMNAAMEELIQLCRNRNAYK

SEQ ID NO: 546 - protein, 440 aa, Artificial Sequence
  engineered beta-1,2-glycosyltransferase encoded in plasmid pA29778
QTLRVLMFPWLALGHVNPFLRIAKQLADRNFHIYLVSTAINLKSIKKRIPEKYSNSIQLVELALPYLPELPPHYHTTNGLPPHLNGILIKALDMSAPNFSKILQNLKPDLVLYDFLQPWAEKVALEQGIPAVPLLTSGAALFSYFFHFLKKPGHEFPFPAIDLSKWEQEKMREMFGKEPTEKDFLAPGNAGIMLMCTSRVIEAKYLDYCSELTNVKVVPVGPPVQDPNTEDIDNPELIKWLDKKPPNSVVYVSFGSEYFLSREDMEEIAHGLELSNVNFIWVIRFPKGEEQALEDVLPKGFLERVGDRGRVLDHLVPQAHILNHPSTGGFISHCGWNSVMESLYFGVPIIAMPMQWDQPINARLLVELGVAVEIRRDEDGRIHREEIARVLKDVITGPTGEKLRRKAREISKKLRARRNEEMQKAMEELIQLCRNRNAYK

SEQ ID NO: 547 - protein, 440 aa, Artificial Sequence
  engineered beta-1,2-glycosyltransferase encoded in plasmid pA29779
QSLRVLMFPWLALGHVNPFLRIAKQLAKRGFVIYLVSTAINLESIKKRIPEKYSNSIHLVELHLPQLPELPPHYHTTNGLPPHLNGILHKALKMAAPNFSKILQNLKPDLVLYDFLQPWAEKVALEQGIPAVPLLTSGAALFSYFFHFLKRPGHEFPFPAIDLSKWEQDWMREMFGKEPTDEDFFAPGNAGIMLMCTSRVIEAKYLDYCSELTNVKVVPVGPPFQDPTTEDIDDPELIKWLDKKPPNSVVYVSFGSEYFLSREDMEEIAFGLELSNVNFIWVARFPKGERQNLEDVLPKGFLERVGDRGRVLDHLVPQAHILNHPSTGGFISHCGWNSVMESLYFGVPIIAMPMQWDQPINARLLVELGVAVEIVRDEDGRIHRDEIAQVLKDVMTGPTGEILRRKVRDISKRLRERREEEMDKAAEELIQLCRNRNAYK

SEQ ID NO: 548 - protein, 440 aa, Artificial Sequence
  engineered beta-1,2-glycosyltransferase encoded in plasmid pA29780
QTLRVLMFPWLALGHVNPFLRIAKQLADRNFVIYLVSTAINLESIKKRIPKKYSNSIHLVELALPYLPELPPHYHTTNGLPPHLNGTLIKALDMSAPNFSKILQNLKPDLVIYDFLQPWAEKVALEQGIPAVPLLTSGAALFSYFFHFLKRPGHEFPFPAIELSKREQDKMREMFGKEPTEEDFLAPGNAGIMLMCTSRVIEAKYLDYCSELTNVKVVPVGPPVQDPLTEDIDNPELIDWLDKKPENSVVYVSFGSEYFLSREDMEEIAFGLELSNVNFIWVVRFPKGEEQNLEDVLPKGFLERVGDRGRVLDHLVPQAHILNHPSTGGFISHCGWNSVMESLYFGVPIIAMPMQWDQPINARLLVELGVAVEIVRDEDGRIHREEIAQVLKDVITGPTGEILRRKAREISKKLRARREEEMQAAAEELIQLCRNRNAYK

SEQ ID NO: 549 - protein, 440 aa, Artificial Sequence
  engineered beta-1,2-glycosyltransferase encoded in plasmid pA29781
QTLRVVMFPWLALGHVNPFLRIAKQLADRGFIIYMVSTAINLESIKKRIPEKYSNSIHLVELHLPELPELPPHYHTTNGLPPHLNGILHKALQMSAPNFSKILQNLKPDLVLYDFLQPWAEKVALEQGIPAVPLLTSGAALFSYFFHFLKRPGHEFPFPEIRLSEREQDKMREMFGTGPTEKDFLAPGNAGIMLMCTSREIEAKYLDYCTTLTNVKVVPVGPPFQDPNTEDNDDPELIKWLDKKPPNSVVYVSFGSEYFLSREDMEEIAHGLELSNVNFIWVARFPKGEEQNLEDVLPKGFLERVGDRGMVLDHLVPQAHILNHPSTGGFISHCGWNSVMESLDFGVPIIAMPMQWDQPINARLLVELGVAVEIRRDEDGRIHREEIAQVLKDVITGPTGEELRRKVRDISERLRRRREEEMDKAAEELIQLCRNRNAYK

SEQ ID NO: 550 - protein, 440 aa, Artificial Sequence
  engineered beta-1,2-glycosyltransferase encoded in plasmid pA29782
RTLRVLMFPWLALGHVNPFLRIAKQLADRGFVIYLVSTAINLKSIKKRIPEKYSNSIHLVELHLPELPELPPHYHTTNGLPPHLNGILHKALKMSAPNFSKILQNLKPDLVLYDFLQPWAEKVALEQGIPAVPLLTSGAALFSYFFHFLKNPGHEFPFPAIELSKREQDKMREMFGTAPTDEDFLAPGNAGIMLMCTSRVIEAKYLDYCTELTNVKVVPVGPPFQDPLTNDIDDPELIDWLDKKPENSVVYVSFGSEYFLSREDMEEIAFGLELSNVNFIWVARFPKGEELNLEDVLPKGFLERVGDRGYVLDHLVPQAHILNHPSTGGFISHCGWNSVMESIDFGVPIIAMPMQWDQPINARLLVELGVAVEIRRDEDGRIHREEIARVLKDVITGPTGEILRRKVRDISKRLRERYEEEMNALAEELIQLCRNRNAYK

SEQ ID NO: 551 - protein, 440 aa, Artificial Sequence
  engineered beta-1,2-glycosyltransferase encoded in plasmid pA29783
RTLRVLMFPWLALGHVNPFLRIAKQLADRGFVIYLVSTAINLKSIKKRIPEKYSNSIHLVELHLPELPELPPHYHTTNGLPPHLNGILHKALKMSAPNFSKILQNLKPDLVLYDFLQPWAEKVALEQGIPAVPLLTSGAALFSYFFHFLKNPGHEFPFPAISLSEREQDKMREMFGTAPTDEDFLAPGNAGIMLMCTSRVIEAKYLDYCTELTNVKVVPVGPPFQDPLTNDIDDPELIDWLDKKPENSVVYVSFGSEYFLSREDMEEIAFGLELSNVNFIWVARFPKGEELNLEDVLPKGFLERVGDRGYVLDHLVPQAHILNHPSTGGFISHCGWNSVMESIDFGVPIIAMPMQWDQPINARLLVELGVAVEIRRDEDGRIHREEIARVLKDVITGPTGEILRRKVRDISKRLRERYEEEMNALAEELIQLCRNRNAYK

SEQ ID NO: 552 - protein, 440 aa, Artificial Sequence
  engineered beta-1,2-glycosyltransferase encoded in plasmid pA29784
QSLRVLMFPWLALGHVNPFLRIAKQLAKRGFVIYLVSTAINLESIKKRIPEKYSNSIHLVELALPELPELPPHYHTTNGLPPHLNGILHKALKMSAPNFSKILQNLKPDLVLYDFLQPWAEKVALEQGIPAVPLLTSGAALFSYFFHFLKRPGHEFPFPAIRLSKWEQDKMREMFGTEPTEEDFFAPGNAGIMLMCTSRVIEAKYLDYCSELTNVKVVPVGPPFQDPTTEDIDDPELIKWLDTKPENSVVYVSFGSEYFLSREDMEEIAFGLELSNVNFIWVARFPKGEEQNLEDVLPKGFLERVGDRGRVLDHLVPQAHILNHPSTGGFISHCGWNSVMESLYFGVPIIAMPMQWDQPINARLLVELGVAVEIVRDEDGRIHRDEIAQVLKDVMFGPTGEILRAKVRDISKRLRARREEEMDAAAEELIQLCRNRNAYK

SEQ ID NO: 553 - protein, 440 aa, Artificial Sequence
  engineered beta-1,2-glycosyltransferase encoded in plasmid pA29785
QRLRVLMFPWLALGHVNPFLRIAKQLADRGFTIYVVSTAINLESIKHRLPKKYSNSIHLVELALPRLPELPPHYHTTNGLPPHLNGKLHKALKMSAPNFSKILQNLKPDLVIYDFLQPWAEKVALSLGIPAVPLLTSGAALFSYFFHFLKKPGSEFPFPAIRLSKREKDMMREMFGTNPTDKDFLAPGNAGIMLMCTSREIEAKYLDYCSELYKVKVVPVGPPFQDPMTNDDDDPELIKWLDKKPPNSVVYVSFGSEYFLSKEDMEEIAFGLELSNVNFIWVARFPKGEEQNLEDVLPKGFLERVRDRGMVLDHLVPQAHILNHPSCGGFISHCGWNSVMESLYFGVPIIAMPMQWDQPINARLLVELGVAVEIRRDEDGRIHREEIAQVLKDVIFGPTGEKLRRKVREISERLRNRQEEEMDALAEELIQLCRNRNAYK

SEQ ID NO: 554 - protein, 440 aa, Artificial Sequence
  engineered beta-1,2-glycosyltransferase encoded in plasmid pA29786
QTFRVLMFPWLALGHVNPFLRIAKELADRGFVIYLVSTAINLESIKKRIPEKYSNSIHLVELHLPTLPELPPHYHTTNGLPPHLNGKLHKALQMAAPNFSKILQNLKPDLVIYDFLQPWAEKVALSLGIPAVFLLTSGAALFSYFFHFLKRPGHEFPFPAIELSKREQDKFREMFGTDPTERDFLAPGNAGIILMCTSRVIEAKYLDYVTELTNVKVVPVGPPFQDPTTEDSDDPELIKWLNKKPPNSVVYVSFGSEYFLSKEDMEEMAFGLELSNVNFIWVARFPKGEEQNIEDVLPKGFLERVGDRGRVLDHLVPQAHILNHPSIGGFISHCGWNSVMESLWFGVPIIAMPMQWDQPINARLLVELGVAVEVRRDEDGRIHREEIARVLKDVMTGPTGEKLRRKVRELSEKLRQRHEEEIDKAAEEFRQLCRNRNAYK

SEQ ID NO: 555 - protein, 440 aa, Artificial Sequence
  engineered beta-1,2-glycosyltransferase encoded in plasmid pA29787
QTLRVLMFPWLALGHVNPFLRIAKQLADRGFVIYVVSTAINLESIKKRIPEKYSNSIHLVELHLPELPELPPHYHTTNGLPPHLNGILHQALKMSAPNFSKILQNLKPDLVLYDFLQPWAEKVALSLGIPAVPLLTSGAALFSYFFHFLKRPGHEFPFPAIDLSKWEQDKFREMFGTEPTEKDFLAPGNAGIMLMCTSREIEAKYLDYCTELTNVKVVPVGPPFQDPDTNDDDDPELIKWLDKKPPNSVVYVSFGSEYFLSREDMEEVAHGLELSNVNFIWVARFPKGEEQNLEDVLPKGFLERVGDRGRVLDHLVPQAHILNHPSTGGFISHCGWNSVMESIYFGVPIIAMPMQWDQPINARLLVELGVAVEIRRDEDGRIHREEIAQVLKDVIMGPTGEKLRRKVRDISERLRKRRNEEMDKAMEELIQLCRNRNAYK

SEQ ID NO: 556 - protein, 440 aa, Artificial Sequence
  engineered beta-1,2-glycosyltransferase encoded in plasmid pA29788
QTLRVLMFPWLALGHVNPFLRIAKQLADRGFVIYVVSTAINLESIKKRIPEKYSNSIHLVELHLPELPELPPHYHTTNGLPPHLNGILHQALKMSAPNFSKILQNLKPDLVLYDFLQPWAEKVALSLGIPAVPLLTSGAALFSYFFHFLKRPGHEFPFPAIDLSKWEQDKFREMFGTEPTEKDFLAPGNAGIMLMCTSREIEAKYLDYCTELTNVKVVPVGPPFQDPDTNDDDDPELIKWLDKKPPNSVVYVSFGSEYFLSREDMEELAHGLELSNVNFIWVARFPKGEEQNLEDVLPKGFLERVGDRGRVLDHLVPQAHILNHPSTGGFISHCGWNSVMESIYFGVPIIAMPMQWDQPINARLLVELGVAVEIRRDEDGRIHREEIAQVLKDVIMGPTGEKLRRKVRDISERLRKRRNEEMDKAMEELIQLCRNRNAYK

SEQ ID NO: 557 - protein, 440 aa, Artificial Sequence
  engineered beta-1,2-glycosyltransferase encoded in plasmid pA29789
QSLRVLMFPWLALGHVNPFLRIAKQLAKRGFVVYLVSTAINLESIKKRIPEKYSNSIHLVELQLPQLPELPPHYHTTNGLPPHLNGILHKALKMAAPNFSKILQTLKPDLVLYDFLQPWAEKVALEQGIPAVPLLTSGAALFSYFFHFLKKPGHEFPFPAIMLSKWEQDWMREMFGKEPTDKDFFAPGNAGIMLICTSRVIEAKYLDYCSELTNVKVVPVGPPFQDPTTEDIDDPELIKWLDKKPPNSVVYVSFGSEYFLSKEDMEEIAFGLELSNVNFIWVARFPKGERQNLEDVLPKGFLERVGDRGRVLDHLVPQAHILNHPSTGGFISHCGWNSVMESLYFGVPIIAMPMQWDQPINARLLVELGVAVEIRRDEDGRIHRDEIARVLKDVMTGPTGEKLRRKVREISERLRRKREEEMDKAAEELIQLCRNRNAYK

SEQ ID NO: 558 - protein, 440 aa, Artificial Sequence
  engineered beta-1,2-glycosyltransferase encoded in plasmid pA29790
QRLRVLMFPWLALGHVNPFLRIAKQLADRGFVIYLVSTAINLESIKKRIPEKYSNSIHLVELALPRLPELPPHYHTTNGLPPHLNGILHKALKMSAPNFSKILQNLKPDLVIYDFLQPWAEKVALEQGIPAVPLLTSGAALFSYFFHFLKRPGHEFPFPAIRLSKREQDMMREMFGTEPTDEDFLAPGNAGIMLMCTSREIEAKYLDYCSELYKVKVVPVGPPFQDPLTRDDDDPELIKWLDKKPENSVVYVSFGSEYFLSKEDMEELAFGLELSNVNFIWVARFPKGEEQNLEDVLPKGFLERVGDRGRVLDHLVPQAHILNHPSCGGFISHCGWNSVMESLYFGVPIIAMPMQWDQPINARLLVELGVAVEIRRDEDGRIHREEIAQVLKDVIFGPTGEILRAKVRDISKRLRERREEEMDALAEELIQLCRNRNAYK

SEQ ID NO: 559 - protein, 440 aa, Artificial Sequence
  engineered beta-1,2-glycosyltransferase encoded in plasmid pA29791
QTLRVLMFPWLALGHVNPFLRIAKELADRGFVIYLVSTAINLESIKKRIPEKYSNSIHLVELHLPTLPELPPHYHTTNGLPPHLNGKLHKALQMAKPNFSKILQNLKPDLVIYDFLQPWAEKVALSLGIPAVPLLTSGAALFSYFFHFLKRPGHEFPFPAIELSKREQDKMREMFGTNPTEKDFLAPGNAGIILMCTSRVIEAKYLDYVTELTNVKVVPVGPPFQDPTTEDDDDPELIKWLNKKPPNSVVYVSFGSEYFLSKEDMEEMAFGLELSNVNFIWVARFPKGEEQNIEDVLPKGFLERVGDRGRVLDHLVPQAHILNHPSIGGFISHCGWNSVMESLWFGVPIIAMPMQWDQPINARLLVELGVAVEVRRDEDGRIHREEIARVLKDVMTGPTGEKLRRKVRELSEKLRKRQEEEMDKAAEELKQLCRNRNAYK

SEQ ID NO: 560 - protein, 440 aa, Artificial Sequence
  engineered beta-1,2-glycosyltransferase encoded in plasmid pA29792
QRLRVLMFPWLALGHVNPFLRIAKQLADRGFVIYLVSTAINLESIKKRIPEKYSNSIHLVELALPRLPELPPHYHTTNGLPPHLNGILHKALKMSAPNFSKILQNLKPDLVIYDFLQPWAEKVALEQGIPAVPLLTSGAALFSYFFHFLKRPGHEFPFPAIRLSKREQDMMREMFGTEPTDEDFLAPGNAGIMLMCTSREIEAKYLDYCSELYKVKVVPVGPPFQDPLTRDDDDPELIKWLDKKPENSVVYVSFGSEYFLSKEDMEELAFGLELSNVNFIWVARFPKGEEQNLEDVLPKGFLERVGDRGRVLDHLVPQAHILNHPSCGGFISHCGWNSVMESLWFGVPIIAMPMQWDQPINARLLVELGVAVEIRRDEDGRIHREEIAQVLKDVIFGPTGEILRAKVRDISKRLRERREEEMDALAEELIQLCRNRNAYK

SEQ ID NO: 561 - protein, 440 aa, Artificial Sequence
  engineered beta-1,2-glycosyltransferase encoded in plasmid pA29793
QTLRVLMFPWLALGHVNPFLRIAKQLADRGFVIYLVSTAINLESIKKRIPEKYSNSIHLVELHLPTLPELPPHYHTTNGLPPHLNGILMKALQMAAPNFSKILQNLKPDLVIYDFLQPWAEKVALELGIPAVPLLTSGAALFSYFFHFLKRPGHEFPFPAIELSKREQDKMREMFGTDPTEKDFLAPGNAGIMLMCTSRVIEAKYLDYCTELTNVKVVPVGPPFQDPLTEDDDDPELIKWLNKKPENSVVYVSFGSEYFLSREDMEEVAFGLELSNVNFIWVARFPKGEEQNIEDVLPKGFLERVGDRGRVLDHLVPQAHILNHPSIGGFISHCGWNSVMESLWFGVPIIAMPMQWDQPINARLLVELGVAVEVRRDEDGRIHREEIARVLKDVVTGPTGEILRRKVREISKKLRERQEEEMNKAAEELRQLCRNRNAYK

SEQ ID NO: 562 - protein, 440 aa, Artificial Sequence
  engineered beta-1,2-glycosyltransferase encoded in plasmid pA29794
QTLRVLMFPWLALGHVNPFLRIAKQLADRNFHIYLVSTAINLKSIKKRIPEKYSNSIQLVELALPYLPELPPHYHTTNGLPPHLNGILIKALDMSAPNFSKILQNLKPDLVIYDFLQPWAEKVALEQGIPAVPLLTSGAALFSYFFHFLKKPGHEFPFPAIYLSKWEQEKMREMFGKEPTEKDFLAPGNAGIMLMCTSRVIEAKYLDYCSELTNVKVVPVGPPVQDPNTEDIDNPELIKWLDKKPPNSVVYVSFGSEYFLSREDMEEIAHGLELSNVNFIWVARFPKGEEQALEDVLPKGFLERVGDRGRVLDHLVPQAHILNHPSTGGFISHCGWNSVMESLYFGVPIIAMPMQWDQPINARLLVELGVAVEIRRDEDGRIHREEIARVLKDVITGPTGEKLRRKAREISKKLRARRNEEMQKAMEELIQLCRNRNAYK

SEQ ID NO: 563 - protein, 440 aa, Artificial Sequence
  engineered beta-1,2-glycosyltransferase encoded in plasmid pA29795
QTLRVVMFPWLALGHVNPFLRIAKQLADRGFIIYMVSTAINLESIKKRIPEKYSNSIHLVELHLPELPELPPHYHTTNGLPPHLNGILHKALQMSAPNFSKILQNLKPDLVLYDFLQPWAEKVALEQGIPAVPLLTSGAALFSYFFHFLKRPGHEFPFPEIRLSEREQDKMREMFGTGPTEKDFLAPGNAGIMLMCTSREIEAKYLDYCTTLTNVKVVPVGPPFQDPTTEDNDDPELIRWLDKKPPNSVVYVSFGSEYFLSREDMEEIAHGLELSNVNFIWVARFPKGEEQNLEDVLPKGFLERVGDRGMVLDHLVPQAHILNHPSTGGFISHCGWNSVMESLDFGVPIIAMPMQWDQPINARLLVELGVAVEIRRDEDGRIHREEIAQVLKDVITGPTGEKLRRKVRDISERLRRRREEEMDKAAEELIQLCRNRNAYK

SEQ ID NO: 564 - protein, 440 aa, Artificial Sequence
  engineered beta-1,2-glycosyltransferase encoded in plasmid pA29796
QTLRVVMFPWLALGHVNPFLRIAKQLADRGFIIYMVSTAINLESIKKRIPEKYSNSIHLVELHLPELPELPPHYHTTNGLPPHLNGILHKALQMSAPNFSKILQNLKPDLVLYDFLQPWAEKVALEQGIPAVPLLTSGAALFSYFFHFLKRPGHEFPFPEIDLSEREQDKMREMFGTGPTEKDFLAPGNAGIMLMCTSREIEAKYLDYCTTLTNVKVVPVGPPFQDPTTEDNDDPELIRWLDKKPPNSVVYVSFGSEYFLSREDMEEIAHGLELSNVNFIWVARFPKGEEQNLEDVLPKGFLERVGDRGMVLDHLVPQAHILNHPSTGGFISHCGWNSVMESLDFGVPIIAMPMQWDQPINARLLVELGVAVEIRRDEDGRIHREEIAQVLKDVITGPTGEELRRKVRDISERLRRRREEEMDKAAEELIQLCRNRNAYK

SEQ ID NO: 565 - protein, 440 aa, Artificial Sequence
  engineered beta-1,2-glycosyltransferase encoded in plasmid pA29797
QTFRVLMFPWLALGHVNPFLRIAKQLADRGFHIYLVSTAINLESIKKRIPEKYSNSIHLVELALPELPELPPHYHTTNGLPPHLNGILHQALKMSQPNFSKILKNLKPDLVLYDFLQPWAEKVALEQGIPAVPFLTSGAALFSYFFHFLKRPGHEFPFPEIDLSKWEQDKMREMFGTQPTDRDFLAPGNAQIMLMCTSRVIEAKYLDYCSELTNVKVVPVGPPFQDPLTEDDDDPELIKWLDKKPPNSVVYVSFGSEYFLSREDMEEIAHGLELSNVNFIWVVRFPKGEEQNLEDVLPKGFLERVGDRGRVLDHLVPQAHILNHPSVGGFISHCGWNSVMESIDFGVPIIAMPMQWDQPINARLLVELGVAVEIRRDEDGRIHREEIAQVIKDVICGPTGEKLRRKVREISERLREKREEEMDAAAEEYKQLCRNRNAYK

SEQ ID NO: 566 - protein, 440 aa, Artificial Sequence
  engineered beta-1,2-glycosyltransferase encoded in plasmid pA29798
QSLRVLMFPWLALGHVNPFLRIAKQLAKRGFVVYLVSTAINLESIKKRIPEKYSNSIHLVELQLPQLPELPPHYHTTNGLPPHLNGILHKALKMAAPNFSKILQTLKPDLVLYDFLQPWAEKVALEQGIPAVPLLTSGAALFSYFFHFLKKPGHEFPFPAIKLSKWEQDKMREMFGKEPTDKDFFAPGNAGIMLICTSRVIEAKYLDYCSELTNVKVVPVGPPFQDPTTEDIDDPELIKWLDKKPPNSVVYVSFGSEYFLSKEDMEEIAFGLELSNVNFIWVARFPKGERQNLEDVLPKGFLERVGDRGRVLDHLVPQAHILNHPSTGGFISHCGWNSVMESLDFGVPIIAMPMQWDQPINARLLVELGVAVEIRRDEDGRIHRDEIARVLKDVMTGPTGEKLRRKVREISERLRRKREEEMDKAAEELIQLCRNRNAYK

SEQ ID NO: 567 - protein, 440 aa, Artificial Sequence
  engineered beta-1,2-glycosyltransferase encoded in plasmid pA29799
RTLRVLMFPWLALGHVNPFLRIAKQLADRGFVIYLVSTAINLKSIKKRIPEKYSNSIHLVELHLPELPELPPHYHTTNGLPPHLNGRLHKALRMSAPNFSKILKNLKPDLVLYDFLQPWAEKVALEQGIPAVPLLTSGAALFSYFFHFLKNPGHEFPFPEISLSERELDKMREMFGTAPTDKDFLAPGNAGIMLMCTSRVIEAKYLDYCTELTNKKVVPVGPPFQDPNTNDIDDPELIKWLDKKPPNSVVYVSFGSEYFLSREDMEEIAFGLELSNVNFIWVARFPKGEELNLEDVLPKGFLERVGDRGYVLDHLVPQAHILKHPSTGGFISHCGWNSVMESIDFGVPIIAMPMQWDQPINARLLNELGVAVEIRRDEDGRIHREEIARVLKDVITGPTGEKLRRKVREISERLRRRRNEEMDALAEELIQLCRNRNAYK

SEQ ID NO: 568 - protein, 440 aa, Artificial Sequence
  engineered beta-1,2-glycosyltransferase encoded in plasmid pA29800
QTLRVLMFPWLALGHVNPFLRIAKQLADRGFVIYLCSTAINLESIKKRIPEKYSESIHLVELHLPELPELPPHYHTTNGLPPHLNGVLHKALQMSAPNFSKILQNLKPDLVLYDFLQPWAEKVAKSLGIPAVPFLTSGAALFSYFFHFLKKPGHEFPFPAIKLSKWEQQKMREMFGTEPTDKDFLAPGNAGIMLMCTSRVIEAKYLDYCSELTNVKVVPVGPPFQDPLTEDEDDPELIKWLDKKPPNSVVYVSFGSEYFLSKEDMEEIAHGLELSNVNFIWVARFPKGEKQNLEDVLPKGFLERVGDRGRVLDHLVPQAHILNHPSIGGFISHCGWNSVMESLDFGVPIIAMPMQWDQPINARLLVELGVAVEIVRDENGRIHREEIAQVLKDVITGPTGEKLRRKVRELSERLRRRRNEEMDAAAEEFIQLCRNRNAYK

SEQ ID NO: 569 - protein, 440 aa, Artificial Sequence
  engineered beta-1,2-glycosyltransferase encoded in plasmid pA29801
QSLRVLMFPWLALGHVNPFLRIAKQLAKRGFVIYLVSTAINLESIKKRIPEKYSNSIHLVELHLPQLPELPPHYHTTNGLPPHLNGILHKALKMAAPNFSKILQNLKPDLVLYDFLQPWAEKVALEQGIPAVPLLTSGAALFSYFFHFLKRPGHEFPFPAIDLSKWEQDWMREMFGKEPTDEDFFAPGNAGIMLMCTSRVIEAKYLDYCSELTNVKVVPVGPPFQDPTTEDIDDPELIKWLDKKPPNSVVYVSFGSEYFLSREDMEEIAFGLELSNVNFIWVARFPKGERQNLEDVLPKGFLERVGDRGRVLDHLVPQAHILNHPSTGGFISHCGWNSVMESLHFGVPIIAMPMQWDQPINARLLVELGVAVEIVRDEDGRIHRDEIAQVLKDVMTGPTGEILRRKVRDISKRLRERREEEMDKAAEELIQLCRNRNAYK

SEQ ID NO: 570 - protein, 440 aa, Artificial Sequence
  engineered beta-1,2-glycosyltransferase encoded in plasmid pA29802
PTFRVLMFPWLALGHVNPFLRIAKQLADRGFHIYLVSTAINLESIKKRIPEKYSNSIHLVELALPELPELPPHYHTTNGLPPHLNGILHQALQMSQPNFSKILKNLKPDLVLYDFLQPWAEKVALEQGIPAVPFLTSGAALFSYFFHFLKRPGHEFPFPEIDLSKWEQDKMREMFGTQPTDRDFLAPGNAQIMLMCTSRVIEAKYLDYCSELTNVKVVPVGPPFQDPLTEDDDDPELIKWLDKKPPNSVVYVSFGSEYFLSREDMEEIAHGLELSNVNFIWVVRFPKGEEINLEDVLPKGFLERVGDRGRVLDHLVPQAHILNHPSVGGFISHCGWNSVMESIDFGVPIIAMPMQWDQPINARLLVELGVAVEIRRDEDGRIHREEIAQVIKDVICGPTGEKLRRKVREISERLREKREEEMDAAAEEYKQLCRNRNAYK

SEQ ID NO: 571 - protein, 440 aa, Artificial Sequence
  engineered beta-1,2-glycosyltransferase encoded in plasmid pA29803
RTLRVLMFPWLALGHVNPFLRIAKQLADRGFVIYLVSTAINLKSIKKRIPEKYSNSIHLVELHLPELPELPPHYHTTNGLPPHLNGILHKALRMSAPNFSKILKNLKPDLVLYDFLQPWAEKVALEQGIPAVPLLTSGAALFSYFFHFLKNPGHEFPFPEIELSKRELDKMREMFGTAPTDKDFLAPGNAGIMLMCTSRVIEAKYLDYCTELTNKKVVPVGPPFQDPNTNDIDDPELIKWLDKKPPNSVVYVSFGSEYFLSREDMEEIAFGLELSNVNFIWVARFPKGEELNLEDVLPKGFLERVGDRGYVLDHLVPQAHILKHPSCGGFISHCGWNSVMESIDFGVPIIAMPMQWDQPINARLLNELGVAVEIRRDEDGRIHREEIARVLKDVITGPTGEKLRRKVREISERLRRRRNEEMDALAEELIQLCRNRNAYK

SEQ ID NO: 572 - protein, 440 aa, Artificial Sequence
  engineered beta-1,2-glycosyltransferase encoded in plasmid pA29804
PTFRVLMFPWLALGHVNPFLRIAKQLADRGFHIYLVSTAINLESIKKRIPEKYSNSIHLVELALPELPELPPHYHTTNGLPPHLNGILHQALQMSQPNFSKILKNLKPDLVLYDFLQPWAEKVALEQGIPAVPFLTSGAALFSYFFHFLKRPGHEFPFPEIDLSKWEQDKMREMFGTQPTDRDFLAPGNAQIMLMCTSRVIEAKYLDYCSELTNVKVVPVGPPFQDPLTEDDDDPELIKWLDKKPPNSVVYVSFGSEYFLSREDMEEIAHGLELSNVNFIWVARFPKGEEINLEDVLPKGFLERVGDRGRVLDHLVPQAHILNHPSVGGFISHCGWNSVMESIDFGVPIIAMPMQWDQPINARLLVELGVAVEIRRDEDGRIHREEIAQVIKDVICGPTGEKLRRKVREISERLREKREEEMDAAAEEYKQLCRNRNAYK

SEQ ID NO: 573 - protein, 440 aa, Artificial Sequence
  engineered beta-1,2-glycosyltransferase encoded in plasmid pA29805
RTLRVLMFPWLALGHVNPFLRIAKQLADRGFVIYLVSTAINLKSIKKRIPEKYSNSIHLVELHLPELPELPPHYHTTNGLPPHLNGILHKALRMSAPNFSKILKNLKPDLVLYDFLQPWAEKVALEQGIPAVPLLTSGAALFSYFFHFLKNPGHEFPFPEISLSERELDKMREMFGTAPTDKDFLAPGNAGIMLMCTSRVIEAKYLDYCTELTNKKVVPVGPPFQDPNTNDIDDPELIKWLDKKPPNSVVYVSFGSEYFLSREDMEEIAFGLELSNVNFIWVARFPKGEELNLEDVLPKGFLERVGDRGYVLDHLVPQAHILKHPSCGGFISHCGWNSVMESIDFGVPIIAMPMQWDQPINARLLNELGVAVEIRRDEDGRIHREEIARVLKDVITGPTGEKLRRKVREISERLRRRRNEEMDALAEELIQLCRNRNAYK

SEQ ID NO: 574 - protein, 440 aa, Artificial Sequence
  engineered beta-1,2-glycosyltransferase encoded in plasmid pA29806
QTLRVLMFPWLALGHVNPFLRIAKQLADRGFVIYLCSTAINLESIKKRIPEKYSESIHLVELHLPELPELPPHYHTTNGLPPHLNGVLHKALQMSKPNFSKILQNLKPDLVLYDFLQPWAEKVAKSLGIPAVPFLTSGAALFSYFFHFLKKPGHEFPFPAIKLSKWEQQKMREMFGTEPTDKDFLAPGNAGIMLMCTSRVIEAKYLDYCSELTNVKVVPVGPPFQDPITEDEDDPELIKWLDKKPPNSVVYVSFGSEYFLSKEDMEEIAHGLELSNVNFIWVARFPKGEKQNLEDVLPKGFLERVGDRGRVLDHLVPQAHILNHPSIGGFISHCGWNSVMESLDFGVPIIAMPMQWDQPINARLLVELGVAVEIVRDEDGRIHREEIAQVLKDVITGPTGEKLRRKVRELSERLRRRRNEEMDAAAEEFIQLCRNRNAYK

SEQ ID NO: 575 - protein, 440 aa, Artificial Sequence
  engineered beta-1,2-glycosyltransferase encoded in plasmid pA29807
QTLRVLMFPWLALGHVNPFLRIAKQLADRGFHIYLVSTAINLESIKKRIPEKYSNSIHLVELALPELPELPPHYHTTNGLPPHLNGTLHKALKMSQPNFSKILQNLKPDLVLYDFLQPWAEKVALEQGIPAVPLLTSGAALFSYFFHFLKRPGHEFPFPAIELSKREQDKMREMFGTEPTEEDFLAPGNAQIMLMMTSRVIEAKYLDYCSELTNVKVVPVGPPFQDPLTEDDDDPELIKWLDKKPENSVVYVSFGSEYFLSREDMEEVAHGLELSNVNFIWVARFPKGEEQNLEDVLPKGFLERVGDRGRVLDHLVPQAHILNHPSVGGFISHCGWNSVMESIDFGVPIIAMPMQWDQPINARLLVELGVAVEIRRDEDGRIHREEIAQVIKDVISGPTGEILRRKVRDISKRLREKREEEMDAAAEELIQLCRNRNAYK

SEQ ID NO: 576 - protein, 440 aa, Artificial Sequence
  engineered beta-1,2-glycosyltransferase encoded in plasmid pA29808
QTFRVLMFPWLALGHVNPFLRIAKQLADRGFHIYLVSTAINLESIKKRIPEKYSNSIHLVELALPELPELPPHYHTTNGLPPHLNGTLHKALKMSQPNFSKILQNLKPDLVLYDFLQPWAEKVALEQGIPAVPLLTSGAALFSYFFHFLKRPGHEFPFPAIELSKREQDKMREMFGTEPTEEDFLAPGNAQIMLMMTSRVIEAKYLDYCSELTNVKVVPVGPPFQDPLTEDDDDPELIKWLDKKPENSVVYVSFGSEYFLSREDMEEVAHGLELSNVNFIWVVRFPKGEEQNLEDVLPKGFLERVGDRGRVLDHLVPQAHILNHPSVGGFISHCGWNSVMESIDFGVPIIAMPMQWDQPINARLLVELGVAVEIRRDEDGRIHREEIAQVIKDVISGPTGEILRRKVRDISKRLREKREEEMDAAAEELIQLCRNRNAYK

SEQ ID NO: 577 - protein, 440 aa, Artificial Sequence
  engineered beta-1,2-glycosyltransferase encoded in plasmid pA29809
QTFRVLMFPWLALGHVNPFLRIAKQLADRNFHIYLVSTAINLKSIKKRIPEKYSNSIQLVELALPELPELPPHYHTTNGLPPHLNGILIKALDMSAPNFSKILQNLKPDLVIYDFLQPWAEKVALEQGIPAVPLLTSGAALFSYFFHFLKKPGHEFPFPAIRLSKWEQEKMREMFGKEPTEKDFLAPGNAGIMLMCTSRVIEAKYLDYCSELTNVKVVPVGPPVQDPNTEDIDNPELIKWLDKKPENSVVYVSFGSEYFLSREDMEEIAHGLELSNVNFIWVARFPKGEEQALEDVLPKGFLERVGDRGRVLDHLVPQAHILNHPSTGGFISHCGWNSVMESLYFGVPIIAMPMQWDQPINARLLVELGVAVEIRRDEDGRIHREEIARVLKDVITGPTGEKLRRKAREISKKLRARRNEEMQKAMEELIQLCRNRNAYK

SEQ ID NO: 578 - protein, 440 aa, Artificial Sequence
  engineered beta-1,2-glycosyltransferase encoded in plasmid pA29810
QTFRVLMFPWLALGHVNPFLRIAKQLADRNFHIYLVSTAINLKSIKKRIPEKYSNSIQLVELALPELPELPPHYHTTNGLPPHLNGILIKALDMSAPNFSKILQNLKPDLVIYDFLQPWAEKVALEQGIPAVPLLTSGAALFSYFFHFLKKPGHEFPFPAIYLSKWEQEKMREMFGKEPTEKDFLAPGNAGIMLMCTSRVIEAKYLDYCSELTNVKVVPVGPPVQDPNTEDIDNPELIKWLDKKPENSVVYVSFGSEYFLSREDMEEIAHGLELSNVNFIWVIRFPKGEEQALEDVLPKGFLERVGDRGRVLDHLVPQAHILNHPSTGGFISHCGWNSVMESLYFGVPIIAMPMQWDQPINARLLVELGVAVEIRRDEDGRIHREEIARVLKDVITGPTGEKLRRKAREISKKLRARRNEEMQKAMEELIQLCRNRNAYK

SEQ ID NO: 579 - protein, 440 aa, Artificial Sequence
  engineered beta-1,2-glycosyltransferase encoded in plasmid pA29811
QTLRVLMFPWLALGHVNPFLRIAKQLADRNFHIYLVSTAINLKSIKKRIPEKYSNSIQLVELALPELPELPPHYHTTNGLPPHLNGTLIKALDMSAPNFSKILQNLKPDLVLYDFLQPWAEKVALEQGIPAVPLLTSGAALFSYFFHFLKKPGHEFPFPAIDLSKREQEKMREMFGKEPTEKDFLAPGNAGIMLMCTSRVIEAKYLDYCSELTNVKVVPVGPPVQDPNTEDIDNPELIKWLDKKPENSVVYVSFGSEYFLSREDMEEIAHGLELSNVNFIWVIRFPKGEEQALEDVLPKGFLERVGDRGRVLDHLVPQAHILNHPSTGGFISHCGWNSVMESLYFGVPIIAMPMQWDQPINARLLVELGVAVEIRRDEDGRIHREEIARVLKDVITGPTGEKLRRKAREISKKLRARRNEEMQKAMEELIQLCRNRNAYK

SEQ ID NO: 580 - protein, 440 aa, Artificial Sequence
  engineered beta-1,2-glycosyltransferase encoded in plasmid pA29812
QTLRVLMFPWLALGHVNPFLRIAKQLADRNFHIYLVSTAINLKSIKKRIPEKYSNSIQLVELALPELPELPPHYHTTNGLPPHLNGILIKALDMSAPNFSKILQNLKPDLVLYDFLQPWAEKVALEQGIPAVPLLTSGAALFSYFFHFLKKPGHEFPFPAIDLSKWEQEKMREMFGKEPTEKDFLAPGNAGIMLMCTSRVIEAKYLDYCSELTNVKVVPVGPPVQDPNTEDIDNPELIKWLDKKPENSVVYVSFGSEYFLSREDMEEIAHGLELSNVNFIWVIRFPKGEEQALEDVLPKGFLERVGDRGRVLDHLVPQAHILNHPSTGGFISHCGWNSVMESLYFGVPIIAMPMQWDQPINARLLVELGVAVEIRRDEDGRIHREEIARVLKDVITGPTGEKLRRKAREISKKLRARRNEEMQKAMEELIQLCRNRNAYK

SEQ ID NO: 581 - protein, 440 aa, Artificial Sequence
  engineered beta-1,2-glycosyltransferase encoded in plasmid pA29813
QTFRVLMFPWLALGHVNPFLRIAKELADRGFVIYLVSTAINLESIKKRIPEKYSNSIHLVELHLPTLPELPPHYHTTNGLPPHLNGKLHKALQMAAPNFSKILQNLKPDLVIYDFLQPWAEKVALSQGIPAVFLLTSGAALFSYFFHFLKRPGHEFPFPAIELSKREQDKFREMFGTDPTERDFLAPGNAGIILMCTSRVIEAKYLDYCTELTNVKVVPVGPPFQDPTTEDSDDPELIKWLNKKPENSVVYVSFGSEYFLSKEDMEEMAFGLELSNVNFIWVARFPKGEEQNIEDVLPKGFLERVGDRGRVLDHLVPQAHILNHPSIGGFISHCGWNSVMESLWFGVPIIAMPMQWDQPINARLLVELGVAVEVRRDEDGRIHREEIARVLKDVITGPTGEKLRRKVRELSEKLRQRHEEEMDKAAEEFRQLCRNRNAYK

SEQ ID NO: 582 - protein, 440 aa, Artificial Sequence
  engineered beta-1,2-glycosyltransferase encoded in plasmid pA29814
QTFRVLMFPWLALGHVNPFLRIAKELADRGFVIYLVSTAINLESIKKRIPEKYSNSIHLVELHLPTLPELPPHYHTTNGLPPHLNGKLHKALQMAAPNFSKILQNLKPDLVIYDFLQPWAEKVALSQGIPAVFLLTSGAALFSYFFHFLKRPGHEFPFPAIELSKREQDKFREMFGTDPTERDFLAPGNAGIILMCTSRVIEAKYLDYCTELTNVKVVPVGPPFQDPTTEDSDDPELIKWLNKKPENSVVYVSFGSEYFLSKEDMEEMAFGLELSNVNFIWVARFPKGEEQNIEDVLPKGFLERVGDRGRVLDHLVPQAHILNHPSIGGFISHCGWNSVMESLWFGVPIIAMPMQWDQPINARLLVELGVAVEVRRDEDGRIHREEIARVLKDVMTGPTGEKLRRKVRELSEKLRQRHEEEMDKAAEEFRQLCRNRNAYK

SEQ ID NO: 583 - protein, 440 aa, Artificial Sequence
  engineered beta-1,2-glycosyltransferase encoded in plasmid pA29815
QTFRVLMFPWLALGHVNPFLRIAKELADRGFVIYLVSTAINLESIKKRIPEKYSNSIHLVELHLPTLPELPPHYHTTNGLPPHLNGKLHKALQMAAPNFSKILQNLKPDLVIYDFLQPWAEKVALSQGIPAVFLLTSGAALFSYFFHFLKRPGHEFPFPAIELSKREQDKFREMFGTDPTERDFLAPGNAGIILMCTSRVIEAKYLDYCTELTNVKVVPVGPPFQDPTTEDSDDPELIKWLNKKPENSVVYVSFGSEYFLSKEDMEEMAFGLELSNVNFIWVARFPKGEEQNIEDVLPKGFLERVGDRGRVLDHLVPQAHILNHPSIGGFISHCGWNSVMESLWFGVPIIAMPMQWDQPINARLLVELGVAVEVRRDEDGRIHREEIARVLKDVMTGPTGEKLRRKVRELSEKLRQRHEEEIDKAAEEFRQLCRNRNAYK

SEQ ID NO: 584 - protein, 440 aa, Artificial Sequence
  engineered beta-1,2-glycosyltransferase encoded in plasmid pA29816
QRLRVLMFPWLALGHVNPFLRIAKQLADRGFTIYVVSTAINLESIKHRLPKKYSNSIHLVELALPRLPELPPHYHTTNGLPPHLNGKLHKALKMSAPNFSKILQNLKPDLVIYDFLQPWAEKVALSQGIPAVPLLTSGAALFSYFFHFLKKPGSEFPFPAIRLSKREKDMMREMFGTNPTDKDFLAPGNAGIMLMCTSREIEAKYLDYCSELYKVKVVPVGPPFQDPMTNDDDDPELIKWLDKKPENSVVYVSFGSEYFLSKEDMEEIAFGLELSNVNFIWVARFPKGEEQNLEDVLPKGFLERVRDRGRVLDHLVPQAHILNHPSCGGFISHCGWNSVMESLYFGVPIIAMPMQWDQPINARLLVELGVAVEIRRDEDGRIHREEIAQVLKDVISGPTGEKLRRKVREISERLRNRQEEEMDALAEELIQLCRNRNAYK

SEQ ID NO: 585 - protein, 440 aa, Artificial Sequence
  engineered beta-1,2-glycosyltransferase encoded in plasmid pA29817
QRLRVLMFPWLALGHVNPFLRIAKQLADRGFTIYVVSTAINLESIKHRLPKKYSNSIHLVELALPRLPELPPHYHTTNGLPPHLNGKLHKALKMSAPNFSKILQNLKPDLVIYDFLQPWAEKVALSQGIPAVPLLTSGAALFSYFFHFLKKPGSEFPFPAIRLSKREKDMMREMFGTNPTDKDFLAPGNAGIMLMCTSREIEAKYLDYCSELYKVKVVPVGPPFQDPMTNDDDDPELIKWLDKKPENSVVYVSFGSEYFLSKEDMEEIAFGLELSNVNFIWVARFPKGEEQNLEDVLPKGFLERVRDRGRVLDHLVPQAHILNHPSCGGFISHCGWNSVMESLYFGVPIIAMPMQWDQPINARLLVELGVAVEIRRDEDGRIHREEIAQVLKDVIFGPTGEKLRRKVREISERLRNRQEEEMDALAEELIQLCRNRNAYK

SEQ ID NO: 586 - protein, 440 aa, Artificial Sequence
  engineered beta-1,2-glycosyltransferase encoded in plasmid pA29818
QRLRVLMFPWLALGHVNPFLRIAKQLADRGFTIYVVSTAINLESIKHRLPKKYSNSIHLVELALPRLPELPPHYHTTNGLPPHLNGKLHKALKMSAPNFSKILQNLKPDLVIYDFLQPWAEKVALSQGIPAVPLLTSGAALFSYFFHFLKKPGSEFPFPAIRLSKREKDMMREMFGTNPTDKDFLAPGNAGIMLMCTSREIEAKYLDYCSELYKVKVVPVGPPFQDPMTNDDDDPELIKWLDKKPENSVVYVSFGSEYFLSKEDMEEIAFGLELSNVNFIWVARFPKGEEQNLEDVLPKGFLERVRDRGMVLDHLVPQAHILNHPSCGGFISHCGWNSVMESLYFGVPIIAMPMQWDQPINARLLVELGVAVEIRRDEDGRIHREEIAQVLKDVIFGPTGEKLRRKVREISERLRNRQEEEMDALAEELIQLCRNRNAYK

SEQ ID NO: 587 - protein, 440 aa, Artificial Sequence
  engineered beta-1,2-glycosyltransferase encoded in plasmid pA29615
QTLRVLMFPWLALGHVNPFLRIAKQLADRGFVIYLCSTAINLESIKKRIPEKYSNSIHLVELALPELPELPPHYHTTNGLPPHLNGTLHKALKMSAPNFSKILQNLKPDLVLYDFLQPWAEKVALEQGIPAVKLLTSGAALFSYFFNFVKKPGHEFPFPAIYLRKIEQVKMREMFEKEPKEEDFLAPGNAGIMLMCTSRVIEAKYIDYLTELSNWKVVPVGPPFQDPLTEDIDDPELIDWLDTKPENSTVFVSFGSEYFLSREDMEEIAFGLELSNVNFIWVARFPKGEEQNLEDALPKGFLERIGDRGRVLDHLVPQAHILNHPSTGGFISHCGWNSVMESIDFGVPIIAMPMQWDQPINARLMVELGVAVEIVRDDDGKIHRGEIAEVLKDVISGPTGEILRAKVRDISKRLRARREEEMNAAAEELIQLCRNRNAYK

SEQ ID NO: 588 - protein, 440 aa, Artificial Sequence
  engineered beta-1,2-glycosyltransferase encoded in plasmid pA29616
QTLRVLMFPWLALGHINPFLRIAKQLADRGFVIYLCSTAINLESIKKRIPEKYSNSIHLVELALPELPELPPHYHTTNGLPPHLNGTLHKALKMSAPNFSKILQNLKPDLVLYDFLQPWAEKVALEQGIPAVKLLTSGAALFSYFFNFVKKPGHEFPFPAIYLRKIEQVKMREMFEKEPKEEDFLAPGNAQIMLMCTSRVIEAKYIDYLTELSNWKVVPVGPPFQDPLTEDIDDPELIDWLDTKPENSTVFVSFGSEYFLSREDMEEIAFGLELSNVNFIWVARFPKGEEQNLEDALPKGFLERIGDRGRVLDHLVPQAHILNHPSTGGFISHCGWNSVMESIDFGVPIIAMPMQWDQPINARLMVELGVAVEIVRDDDGKIHRGEIAEVLKDVISGPTGEILRAKVRDISKRLRARREEEMNAAAEELIQLCRNRNAYK

SEQ ID NO: 589 - protein, 440 aa, Artificial Sequence
  engineered beta-1,2-glycosyltransferase encoded in plasmid pA29617
QTLRVLMFPWLALGHINPFLRIAKQLADRGFVIYLCSTAINLESIKKRIPEKYSNSIHLVELALPELPELPPHYHTTNGLPPHLNGTLKKALKMSAPNFSKILQNLKPDLVLYDFLQPWAEKVANEQGIPAVKLLTSGAALFSYFFNFVKKPGHEFPFPAIYLRKIEQVKMREMFEKEPKEEDFLAPGNAQIMLMCTSRVIEAKYIDYLTELSNWKVVPVGPPFQDPLTEDIDDPELIDWLDTKPENSTVFVSFGSEYFLSREDMEEIAFGLELSNVNFIWVARFPKGEEQNLEDALPKGFLERIGDRGRVLDHLVPQAHILNHPSTGGFISHCGWNSVMESIDFGVPIIAMPMQWDQPINARLMVELGVAVEIVRDDDGKIHRGEIAETLKDVISGPTGEILRAKVRDISKRLRARREEEMNAAAEELIQLCRNRNAYK

SEQ ID NO: 590 - protein, 440 aa, Artificial Sequence
  engineered beta-1,2-glycosyltransferase encoded in plasmid pA29618
QTLRVLMFPWLALGHVNPFLRIAKQLADRGFVIYLVSTAINLESIKKRIPEKYSNSIHLVELALPELPELPPHYHTTNGLPPHLNGTLHKALKMSAPNFSKILQNLKPDLVLYDFLQPWAEKVALEQGIPAVPLLTSGAALFSYFFNFVKKPGHEFPFPAIYLRKIEQVKMREMFEKEPKEEDFLAPGNAGIMLMCTSRVIEAKYIDYLTELSNWKVVPVGPPFQDPLTEDIDDPELIDWLDTKPENSVVYVSFGSEYFLSREDMEEIAFGLELSNVNFIWVARFPKGEEQNLEDALPKGFLERIGDRGRVLDHLVPQAHILNHPSTGGFISHCGWNSVMESIDFGVPIIAMPMQWDQPINARLMVELGVAVEIVRDDDGKIHRGEIAEVLKDVISGPTGEILRAKVRDISKRLRARREEEMNAAAEELIQLCRNRNAYK

SEQ ID NO: 591 - protein, 440 aa, Artificial Sequence
  engineered beta-1,2-glycosyltransferase encoded in plasmid pA29619
QTLRVLMFPWLALGHVNPFLRIAKQLADRGFVIYLCSTAINLESIKKRIPEKYSNSIHLVELALPELPELPPHYHTTNGLPPHLNGTLHKALKMSAPNFSKILQNLKPDLVLYDFLQPWAEKVALEQGIPAVKLLTSGAALFSYFFNFLKRPGHEFPFPAIRLSKREQDKMREMFGTEPTEEDFLAPGNAGIMLMCTSRVIEAKYLDYCTELTNVKVVPVGPPFQDPLTEDIDDPELIDWLDTKPENSTVFVSFGSEYFLSREDMEEVAFGLELSNVNFIWVARFPKGEEQNLEDVLPKGFLERVGDRGRVLDHLVPQAHILNHPSTGGFISHCGWNSVMESIDFGVPIIAMPMQWDQPINARLLVELGVAVEIVRDEDGRIHRGEIAQVLKDVISGPTGEILRAKVRDISKRLRARREEEMNAAAEELIQLCRNRNAYK

SEQ ID NO: 592 - protein, 440 aa, Artificial Sequence
  engineered beta-1,2-glycosyltransferase encoded in plasmid pA29620
QTLRVLMFPWLALGHINPFLRIAKQLADRGFVIYLCSTAINLESIKKRIPEKYSNSIHLVELALPELPELPPHYHTTNGLPPHLNGTLHKALKMSAPNFSKILQNLKPDLVLYDFLQPWAEKVALEQGIPAVKLLTSGAALFSYFFNFLKRPGHEFPFPAIRLSKREQDKMREMFGTEPTEEDFLAPGNAQIMLMCTSRVIEAKYIDYLTELTNVKVVPVGPPFQDPLTEDIDDPELIDWLDTKPENSTVFVSFGSEYFLSREDMEEIAFGLELSNVNFIWVARFPKGEEQNLEDVLPKGFLERIGDRGRVLDHLVPQAHILNHPSTGGFISHCGWNSVMESIDFGVPIIAMPMQWDQPINARLLVELGVAVEIVRDEDGRIHRGEIAQVLKDVISGPTGEILRAKVRDISKRLRARREEEMNAAAEELIQLCRNRNAYK

SEQ ID NO: 593 - protein, 440 aa, Artificial Sequence
  engineered beta-1,2-glycosyltransferase encoded in plasmid pA29621
QTLRVLMFPWLALGHINPFLRIAKQLADRGFVIYLCSTAINLESIKKRIPEKYSNSIHLVELALPELPELPPHYHTTNGLPPHLNGTLKKALKMSAPNFSKILQNLKPDLVLYDFLQPWAEKVANEQGIPAVKLLTSGAALFSYFFNFLKRPGHEFPFPAIRLRKREQDKMREMFGTEPTEEDFLAPGNAQIMLMCTSRVIEAKYIDYLTELTNWKVVPVGPPFQDPLTEDIDDPELIDWLDTKPENSTVFVSFGSEYFLSREDMEEIAFGLELSNVNFIWVARFPKGEEQNLEDVLPKGFLERIGDRGRVLDHLVPQAHILNHPSTGGFISHCGWNSVMESIDFGVPIIAMPMQWDQPINARLLVELGVAVEIVRDEDGRIHRGEIAQVLKDVISGPTGEILRAKVRDISKRLRARREEEMNAAAEELIQLCRNRNAYK

SEQ ID NO: 594 - protein, 440 aa, Artificial Sequence
  engineered beta-1,2-glycosyltransferase encoded in plasmid pA29622
TTLRVLMFPWLALGHVNPFLRLAKKLADRGFLIYLCSTPINLKSIKKRIPEKYSDSIQLVELHLPELPELPPHYHTTNGLPPHLNGTLQKALKMSAPNFSKILQNLKPDLVIYDFLQQWAEKVALEQNIPAVKLLTSGAALFSYFFNFVKKPGVEFPFPAIRLSKREQDKMREMFGTEPTDEDFFAEGNMQIMLMCTSRAIEAKYIDYLTELSNWKVVPVGPPFQDPLTNDDDDVELIDWLGTKDENSTVYVSFGSEYFLSKEDMEEIAFGLELSNVNFIWVARFPKGEEQNLEDALPKGFLERIGERGRVLDHLVPQAHILNHPSTGGFISHCGWNSVMESIDFGVPIIAMPMQWDQPINARLMVELGVAVEIVRDDDGKIHRGEIAETLKDVITGKTGENLRAKVRDISKNLKSIRGEEMDAAAEELIQLCQNRNAYK

SEQ ID NO: 595 - protein, 440 aa, Artificial Sequence
  engineered beta-1,2-glycosyltransferase encoded in plasmid pA29623
STLRVLMFPWLALGHVNPFLRLAKKLADRGFLIYLCSTPINLKSIKKRIPEKYSDSIQLVELHLPELPELPPHYHTTNGLPPHLNGTLKKALKMSAPNFSKILENLKPDLLIYDFLQPWAEKVALEQNIPAVKLLTSGAALFSYFFHFVKKPGVEFPFPAIRLSKREQDKMREMFGTEPTDEDFLAEGNSQIILMCTSREIEAKYIDYLSELTNKKVVPVGPPFQDPLTNDDDDVELIDWLGTKDENSTVYVSFGSEYFLSKEDMEEIAFGLELSNVNFIWVARFPKGEEQNLEDALPKGFLERIGERGRVLDHLVPQAHILNHPSTGGFVSHCGWNSVMESIDFGVPIIAMPMQWDQPINARLMVELGVAVEIVRDDDGKIHRGEIAEVLKDVVVGKTGENLRAKVRDISENLKSKRGEEMDAAAEELIQLCTNRNAYK

SEQ ID NO: 596 - protein, 440 aa, Artificial Sequence
  engineered beta-1,2-glycosyltransferase encoded in plasmid pA29624
STLRVLMFPWLALGHVNPFLRLAKKLADRGFLIYLCSTPINLNSIKKRIPEKYSDSIQLVELHLPELPELPPHYHTTNGLPPHLNGTLQKALKMSAPNFSKILQNLKPDLVIYDFLQQWAEKVALEQNIPAVRLLTSGAALFSYFFNFLRKPGVEFPFPAIRLSKREQDKMREMFGTEPTDEDFLAEGNMQIMLVCTSRAIEAKYIDYLSELSNWKVVPVGPPFQDPLTNDDDDVELIDWLGKKDENSTVYVSFGSEYFLSKEDMEEIAFGLELSNVNFIWVARFPKGEEQNLEEALPKGFLERIGERGRVLDHLVPQAHILNHPSTGGFISHCGWNSVMESIDFGVPIIAMPMQWDQPINARLMVELGVAVEIVRDDDGKIHREEIAQVLKEVITGKTGENLRRKVRDISKNLKSIREEEMDAAAEELIQLCFNRNAYK

SEQ ID NO: 597 - protein, 440 aa, Artificial Sequence
  engineered beta-1,2-glycosyltransferase encoded in plasmid pA29625
TTLRVLMFPWLALGHVNPFLRLAKKLADRGFLIYLCSTPINLKSIKKRIPEKYSDSIQLVELHLPELPELPPHYHTTNGLPPHLNGTLQKALKMSAPNFSKILQNLKPDLVIYDFLQPWAEKVALEQNIPAVKLLTSGAALFSYFFHFVKKPGVEFPFPAIRLSKREQDKMREMFGTEPTDEDFLAKGSTQIVLMCTSREIEAKYIDYLSELSNWKVVPVGPPFQDPLTNDADDMELIDWLGKKDENSTVYVSFGSEYFLSKEDMEEIAFGLELSNVNFIWVARFPKGEEQNLEDALPKGFLERIGERGRVLDHLVPQAHILNHPSTGGFVSHCGWNSVMESIDFGVPIIAMPMQWDQPINARLMVELGVAVEIVRDENGKIHRGEIAQVIKSVITGKTGENLRAKVRDISKNLKSIREEEMDAAAEELIQLCPNRNAYK

SEQ ID NO: 598 - protein, 440 aa, Artificial Sequence
  engineered beta-1,2-glycosyltransferase encoded in plasmid pA29626
STLRVLMFPWLALGHVNPFLRVAKKLADRGFLIYLCSTPINLESIKKRIPEKYSDSIHLVELHLPELPELPPHYHTTNGLPPHLNGTLKKALKMSAPNFSKILQNLKPDLVIYDFLQQWAEKVALSQNIPAVKLLTSGAALFSYFFNFVKKPGVEFPFPAIRLSKREQDKMREMFGTEPTDVDFFADGNNQIMLMCTSREIEAKYIDYLTELSNWKVVPVGPPFQDPLTNDDDDVELIDWLGTKDENSTVYVSFGSEYFLSKEDMEEVAFGLELSNVNFIWVARFPKGEEQNLEDALPKGFLERIGERGRVLDHLVPQAHILNHPSTGGFISHCGWNSVMESIDFGVPIIAMPMQWDQPINARLIVELGVAVEIVRDDDGKIHRGEIAETLKDVITGKTGENLRAKVRDISKNLKSIRGEEMDAAAEELIQLCDNRNAYK

SEQ ID NO: 599 - protein, 440 aa, Artificial Sequence
  engineered beta-1,2-glycosyltransferase encoded in plasmid pA29627
STLRVLMFPWLALGHVNPFLRLAKKLADRGFLIYFCSTPINLKSIKKRIPEKYSDSIQLVELHLPELPELPPHYHTTNGLPPHLNGTLKKALKMSAPNFSKILQNLKPDLVIYDFLQQWAEKVALEQNIPAVKLLTSGAALFSYFFNFVKKPGVEFPFPAIRLSKREQDKMREMFGTEPTEEDFLAEGNSQIMLMCTSREIEAKYIDYLSELSNWKVVPVGPPFQDPLTNDDDDVELIDWLGKKDENSTVYVSFGSEYFLSKEDMEEIAFGLELSNVNFIWVARFPKGEEQNLEDALPKGFLERIGERGRVLDHLVPQAHILNHSSTGGFVSHCGWNSVMESIDFGVPIIAMPMQWDQPINARLLVELGVAVEIVRDDDGKIHREEIAKVLKDVVGGKTGENLRAKVRDISKNLKSIREEEMDAAAEELIQLCENRNAYK

SEQ ID NO: 600 - protein, 440 aa, Artificial Sequence
  engineered beta-1,2-glycosyltransferase encoded in plasmid pA29628
STLRVLMFPWLALGHVNPFLRLAKKLADRGFLIYLCSTPINLNSIKKRIPEKYSLSIELVELHLPELPELPPHYHTTNGLPPHLNGTLKKALKMSAPNFSKILQNLKPDLVIYDFLQQWAEKVALSQNIPAVKLLTSGAALFSYFFNFVKKPGVEFPFPAIRLSKREQDKMREMFGTEPTDVDFLADGSCKIMLMCTSRTIEAKYIDYLTELSNWKVVPVGPPFQDPLTNDDDDVELIDWLGTKDENSTVYVSFGSEYFLSKEDMEEIAFGLELSNVNFIWVARFPKGEEQNLEDALPKGFLERIGERGRVLDHLVPQAHILNHPSTGGFISHCGWNSVMESIDFGVPIIAMPMQWDQPINARLMVELGVAVEIVRDDDGKIHRGEIAEVLKDVITGETGENLRAKVRDISENLKSIRGEEMDAVAEELIQLCFNRNAYK

SEQ ID NO: 601 - protein, 440 aa, Artificial Sequence
  engineered beta-1,2-glycosyltransferase encoded in plasmid pA29629
TTLRVLMFPWLALGHVNPYLRLAKKLADRGFLIYLCSTPINLNSIKKRIPEKYSDSIQLVELHLPELPELPPHYHTTNGLPPHLNGTLKKALKMSAPNFSKILQNLKPDLLIYDFLQPWAEKVALSQNIPAVKLLTSGAALFSYFFNFVRKPGVEFPFPAIRLSKREQDKMREMFGTEPTDEDFEAEGNTQIMLMCTSREIEAKYIDYLTELSNWKVVPVGPPFQDPLTNDDDDSELIDWLGKKDENSTVYVSFGSEYFLSKEDMEEIAFGLELSNVNFIWVARFPKGEEQNLEDALPKGFLERIGERGRVLDHLVPQAHILNHPSTGGFVSHCGWNSVMESIDFGVPIIAMPMQWDQPINARLMVELGVAVEIVRDDDGKIHRGEIAEVLKDVITGKTGENLRAKVRDISENLKSRRDEEMDAAAEELIQLCHNRNAYK

SEQ ID NO: 602 - protein, 440 aa, Artificial Sequence
  engineered beta-1,2-glycosyltransferase encoded in plasmid pA29630
STLRVLMFPWLALGHVNPFLRLAKKLADRGFLIYLCSTPINLNSIKKRIPEKYSDSIQLVELHLPELPELPPHYHTTNGLPPHLNGTLKKAFKMSAPNFSKILQNLKPDLVIYDFLQPWAEKVALSQNIPAIKLLTSGAALFSYFFNFVKKPGVEFPFPAIRLSKREQDKMREMFGTEPTDDDFLAEGNMKIILMCTSRAIEAKYIDYLTELSNWKVVPVGPPFQDPLTNDDDDVELIDWLGKKDENSTVYVSFGSEYFLSKEDMEEIAFGLELSNVNFIWVARFPKGEEQNLEDALPKGFLERIGERGRVLDHLVPQAHILNHPSTGGFISHCGWNSVMESIDFGVPIIAMPMQWDQPINARLIVELGVAVEIVRDDDGKIHRGEIAETIKDVITGKTGENLRAKVRDISKNLKSIRGEEMDAAAEELIQLCWNRNAYK

SEQ ID NO: 603 - protein, 440 aa, Artificial Sequence
  engineered beta-1,2-glycosyltransferase encoded in plasmid pA29631
TTLRVLMFPWLALGHVNPFLRLAKKLADRGFLIYLCSTPINLKSIKKRIPEKYSDSIHLVELHLPELPELPPHYHTTNGLPPHLNGTLQKALKMSAPNFSKILQNLKPDLVIYDFLQQWAEKVALEQNIPAVKLLTSGAALFSYFFNFVKKPGVEFPFPAIRLSKREQDKMREMFGTEPTEEDFFAEGNMQIMLMCTSRTIEAKYIDYLTELLNWKVVPVGPPFQDPLTNDDDDVELIDWLGTKDENSTVYVSFGSEYFLSKEDMEEIAFGLELSNVNFIWVARFPKGEEQNLEDALPKGFLERIGERGRVLDHLVPQAHILNHPSTGGFISHCGWNSVMESIDFGVPIIAMPMQWDQPINARLVVELGVAVEIVRDDDGKIHRGEIAETLKDVITGKIGENLRAKVRDISKNLKSRREEEMDAAAEELIQLCDNRNAYK

SEQ ID NO: 604 - protein, 440 aa, Artificial Sequence
  engineered beta-1,2-glycosyltransferase encoded in plasmid pA29632
SNLRVLMFPWLALGHVNPFLRLAKKLADRGFLIYLCSTPINLNSIKKRIPEKYSNSIQLVELHLPELPELPPHYHTTNGLPPHLNGTLQKALKMSAPNFSKILQNLKPDLVIYDFLQQWAEKVALEQNIPAVKLLTSGAALFSYFFNFVRKPGVEFPFPAIRLSKREQDKMREMFGTEPTDEDFFAKGNTQIILMCTSREIEAKYIDYLTELSNWKVVPVGPPFQDPLTEDDDDIELIDWLGKKDENSTVYVSFGSEYFLSKEDMEEIAFGLELSNVNFIWVARFPKGEEQNLEDALPKGFLERIGERGRVLDHLVPQAHILNHPSTGGFVSHCGWNSVMESIDFGVPIIAMPMQWDQPINARLMVELGVAVEIVRDDDGKIHRGEIAEVIKDVITGKTGENLRAKVRDISKNLKSIREEEMDAAAEELIQLCRNRNAYK

SEQ ID NO: 605 - protein, 440 aa, Artificial Sequence
  engineered beta-1,2-glycosyltransferase encoded in plasmid pA29633
TTLRVLMFPWLALGHVNPFLRLAKKLADRGFLIYLCSTPINLKSIKKRIPEKYSDSIQLVELHLPELPELPPHYHTTNGLPPHLNGTLHKALKMSAPNFSKILKNLKPDLVIYDFLQQWAEKVALEQNIPAVKLLTSGAALFSYFFNFVKKPGVEFPFPAIRLSKREQDKMREMFGTEPTEEDFLAEGNMQIMLMCTSREIEAKYIDYLSELSNWKVVPVGPPFQDPLTNDADDVELIDWLGTKDENSTVYVSFGSEYFLSKEDMEEIAFGLELSNVNFIWVARFPKGEEQNLEDALPKGFLERIGERGRVLDHLVPQAHILNHPSTGGFVSHCGWNSVMESIDFGVPIIAMPMQWDQPINAKLMVELGVAVEIVRDDDGKIHREEIAETLKDVITGKTGENLRKKVRDISKNLKSIRGEEMDAAAEELIQLCANRNAYK

SEQ ID NO: 606 - protein, 440 aa, Artificial Sequence
  engineered beta-1,2-glycosyltransferase encoded in plasmid pA29634
TTLKVLMFPWLALGHVNPFLRLAKKLADRGFLIYLCSTPINLSSIKKRIPEKYSDSIQLVELHLPELPELPPHYHTTNGLPPHLNGTLKKALKMSAPNFSKILQNLKPDLVIYDFLQQWAEKVALEQNIPAVKLLTSGAALFSYFFNFVKKPGVEFPFPAIRLSKRELDKMREMFGTEPTDEDFLAEGNMQIMLICTSRIIEAKYIDYLTELSNWKVVPVGPPFQDPLTNDDDDVELIDWLGKKDENSTVYVSFGSEYFLSKEDMEEIAFGLELSNVNFIWVARFPKGEEQNLEDALPKGFLERIGERGRVLDHLVPQAHILNHPSTGGFVSHCGWNSVMESIDFGVPIIAMPMQWDQPINARLVVELGVAVEIVRDDDGKIHREEIAQTLKDVITGKTGENLRAKVRDISKNLKSKREEEMDAAAEELIQLCKNRNAYK

SEQ ID NO: 607 - protein, 440 aa, Artificial Sequence
  engineered beta-1,2-glycosyltransferase encoded in plasmid pA29635
STLRVLMFPWLALGHVNPFLRLAKKLADRGFYIYLCSTPINLKSIKKRIPEKYSDSIQLVELHLPELPELPPHYHTTNGLPPHLNGTLQKALKMSAPNFSKILQNLKPDLLIYDFLQPWAEKVALEQNIPAVRFLTSGAALFSYFFNFVKKPGVEFPFPAIRLSKREQDKMREMFGTEPTDEDFLAEGNMQIMLMCSSRAIEAKYIDYLTELINWKVVPVGPPFQDPLTNDDDDVELIDWLGKKDENSTVYVSFGSEYFLSKEDMEEIAFGLELSNVNFIWVARFPKGEEQNLEDALPKGFLERIGERGRVLDHLVPQAHILNHPSTGGFVSHCGWNSVMESIDFGVPIIAMPMQWDQPINARLMVELGVAVEIVRDDDGKIHRGEIAQTLKDVITGKTGENLRAKVRDISKNLKSIRDEEMDAAAEELIQLCWNRNAYK

SEQ ID NO: 608 - protein, 440 aa, Artificial Sequence
  engineered beta-1,2-glycosyltransferase encoded in plasmid pA29636
STLRVLMFPWLALGHVNPFLRVAKKLADRGFLIYLCSTPINLKSIKKRIPEKYSDSIQLVELHLPELPELPPHYHTTNGLPPHLNGTLQKALKMSAPNFSKILQNLKPDLVIYDFLQPWAEKVALSQNIPAVKLLTSGAALFSYFFNFVKKPGVEFPFPAIRLSKREQDKMREMFGTEPTDEDFFAEGNKQIMLMCTSRIIEAKYIDYLSELSNWKVVPVGPPFQDPLTNDADDVELIDWLGTKDENSTVYVSFGSEYFLSKEDMEEIAFGLELSNVNFIWVARFPKGEEVNLEDALPKGFLERIGERGRVLDHLVPQAHILNHPSTGGFISHCGWNSVMESIDFGVPIIAMPMQWDQPINARLMVELGVAVEIVRDDDGKIHRGEIAQVVKDVITGKTGENLRAKVRDISENLKSIREEEMDAAAEELIQLCYNRNAYK

SEQ ID NO: 609 - protein, 440 aa, Artificial Sequence
  engineered beta-1,2-glycosyltransferase encoded in plasmid pA29637
STLKVLMFPWLALGHVNPFLRLAKKLADRGFLIYLCSTPINLNSIKKRIPEKYSDSIQLVELHLPELPELPPHYHTTNGLPPHLNGTLKKALKMSAPNFSKILQNLKPDLVIYDFLQQWAEKVALEQNIPAVKLLTSGAALFSYFFNFVKKPGVEFPFPAIRLSKREQDKMREMFGTEPTDEDFLAEGNCQIMLMCTSRAIEAKYIDYLTELSNWKVIPVGPPFQDPLTNDDDDTELIDWLGTKDENSTVYVSFGSEYFLSKEDMEEIAFGLELSNVNFIWVARFPKGEEQNLEDALPKGFLERIGDRGRVLDHLVPQAHILNHPSTGGFISHCGWNSVMESIDFGVPIIAMPMQWDQPINARLVVELGVAVEIVRDDDGKIHRGEIAEVLKGVITGKTGENLRAKVRDISKNLKSIREEEMDAAAEELIQLCINRNAYK

SEQ ID NO: 610 - protein, 440 aa, Artificial Sequence
  engineered beta-1,2-glycosyltransferase encoded in plasmid pA29638
STLRVLMFPWLALGHVNPFLRLAKKLADRGFLIYLCSTPINLKSIKKRIPEKYSDSIQLVELHLPELPELPPHYHTTNGLPPHLNGTLKKALKMSAPNFSKILENLKPDLLIYDFLQPWAEKVALEQNIPAVKLLTSGAALFSYFFHFVKKPGVEFPFPAIRLSKREQDKMREMFGTEPTDEDFLAEGNSQIILMCTSREIEAKYIDYLSELTNWKVVPVGPPFQDPLTNDDDDVELIDWLGTKDENSTVYVSFGSEYFLSKEDMEEIAFGLELSNVNFIWVARFPKGEEQNLEDALPKGFLERIGERGRVLDHLVPQAHILNHPSTGGFVSHCGWNSVMESIDFGVPIIAMPMQWDQPINARLMVELGVAVEIVRDDDGKIHRGEIAEVLKDVVVGKTGENLRAKVRDISENLKSKRGEEMDAAAEELIQLCTNRNAYK

SEQ ID NO: 611 - protein, 440 aa, Artificial Sequence
  engineered beta-1,2-glycosyltransferase encoded in plasmid pA29639
TTLRVLMFPWLALGHVNPFLRLAKKLADRGFLIYLCSTPINLNSIKKRIPEKYSDSIQLVELHLPELPELPPHYHTTNGLPPHLNGTLQKALKMSAPNFSKILQNLKPDLVIYDFLQPWAEKVALEQNIPAVKLLTSGAALFSYFFHFVKKPGVEFPFPAIRLSKREQDKMREMFGTEPTDEDFFAEGNMQIMLMCSSRAIEAKYIDYLTELSNWKVVPVGPPFQDPLTNDDDDVELIDWLGKKDENSTVYVSFGSEYFLSKEDMEEIAFGLELSNVNFIWVARFPKGEEQNLEDALPKGFLERIGERGRVLDHLVPQAHILNHSSTGGFVSHCGWNSVMESIDFGVPIIAMPMQWDQPINARLMVELGVAVEIVRDDDGKIHRGEIAEVLKDVITGKTGENLRKKVKDISKKLKSRREEEMDAAAEELIQLCVNRNAYK

SEQ ID NO: 612 - protein, 440 aa, Artificial Sequence
  engineered beta-1,2-glycosyltransferase encoded in plasmid pA29640
TTLRVLMFPWLALGHVNPFLRLAKKLADRGFLIYLCSTPINLKSIKKRIPEKYSDSIQLVELHLPELPELPPHYHTTNGLPPHLNGTLQKALKMSAPNFSKILQNLKPDLVIYDFLQPWAEKVALEQNIPAVKLLTSGAALFSYFFHFVKKPGVEFPFPAIRLSKREQDKMREMFGTEPTDEDFLAKGSTQIVLMCTSREIEAKYIDYLSELSNWKVVPVGPPFQDPLTNDADDMELIDWLGKKDENSTVYVSFGSEYFLSKEDMEEIAFGLELSNVNFIWVARFPKGEEQNLEDALPKGFLERIGERGRVLDHLVPQAHILNHPSTGGFVSHCGWNSVMESIDFGVPIIAMPMQWDQPINARLMVELGVAVEIVRDENGKIHRGEIAQVLKSVITGKTGENLRAKVRDISKNLKSIREEEMDAAAEELIQLCPNRNAYK

SEQ ID NO: 613 - protein, 440 aa, Artificial Sequence
  engineered beta-1,2-glycosyltransferase encoded in plasmid pA29641
STIRVLMLPWLALGHVNPFLRLAKKLTKRNFHIYLCSTPINLSSIKKRIPEKYSLSIELVELHLPSLPELPPHYHTTNGLPPHLNGTLKKAFEMAAPNFSNILKTLKPDLVIYDFLQPWAPKVALSQNIPAVQFLTSGAALFSYFLHFFKKPGVEFPFPAIRLSEREIDKMREMFGTEPTDEDFLIKRSCNIILICTFREIEGKYIDYLSVLTEKKIVPVGPPFQEPLDEDDDDTELIQWLDKKDESSTVYVSFGSEYFLSKEEMEEVAHGLELSKVNFIWVARFPVGEKIRVEEALPEGFLERVGERGMVLDHLVPQAHILGHSSTGGFVSHCGWNSVMESIKFGVPIIAMPMQWDQPINARLVEEVGVGVEVKRDENGRLQREEIAQVIRKVVVEKSGEDVRRKARELSEKIRMKGEEEIDEVVEELVQLCLNRNAYK

SEQ ID NO: 614 - protein, 440 aa, Artificial Sequence
  engineered beta-1,2-glycosyltransferase encoded in plasmid pA29642
TTLRVLMFPWLALGHVNPFLRLAKKLADRGFLIYLCSTPINLNSIKKRIPEKYSDSIQLVELHLPELPELPPHYHTTNGLPPHLNGTLHKALKMSAPNFSKILQNLKPDLVIYDFLQPWAEKVALSQNIPAVKLLTSGAALFSYFFHFVKKPGVEFPFPAIRLSKREQDKMREMFGTEPTDEDFLAEGPMGIMLMCTSREIEAKYIDYLTELSNRKVVPVGPPFQDPLTDDDDDSELIDWLGKKDENSTVYVSFGSEYFLSKEDMEEIAFGLELSNVNFIWVARFPKGEEQNLEDALPKGFLERIGDRGRVLDHLVPQAHILNHPSTGGFVSHCGWNSVMESIDFGVPIIAMPMQWDQPINARLMVELGVAVEIVRDDNGKIHRGEIAEVVKDVIGGKTGENLRKKVRDISENLKSKRKEEMDAAVEELIQLCTNRNAYK

SEQ ID NO: 615 - protein, 440 aa, Artificial Sequence
  engineered beta-1,2-glycosyltransferase encoded in plasmid pA29643
RSISVLMLPWLALGHVNPFLRLAKKLTKRNFHIYFCSTPINLSSIKKRIPEKYSHSIELVELHLPSLPELPPHYHTTNGLPPHLNGTLKKAFDMAAPNFSNILKTLKPDLLIYDFLQPWAPKLALSQNIPAVQFLTSGATLFSYFFHFFKNPGVEFPFPEIRLSDREIDKMRNMFGTEPTDEDFLIERSSNIILICTFREIEGKYIDYLSSLVGKKIVPVGPPFQDPLDDDEDGTELIEWLDKKEKSSTVYVSFGSEYFLSKEEMEEIAHGLELSKVNFIWVARFPKGEKIKLEEALPKGFLERVGERGMVLDHLVPQAHILGHSSIGGFVSHCGWNSVMESMKFGVPIIAMPMQWDQPINARLVEEVGVGVEVKRDENGRLEREEIAKVIKEVVVEKSGEGVRKKAREMSENMKKKGEEEIDEVVEELVQLCMNRNAYK

SEQ ID NO: 616 - protein, 440 aa, Artificial Sequence
  engineered beta-1,2-glycosyltransferase encoded in plasmid pA29645
SSISVLMLPWLALGHVNPFLRLAKKLTKRNFHIYFCSTPINLNSIKKRLPEKYSLSIELVELHLPSLPELPPHYHTTNGLPPHLNGTLKKAFDMAAPNFSNILKTLNPDLLIYDFLQPWAPKIALSQNIPAVQFLTSGAALFSYFLHFFKKPGVEFPFPEIRLSDREIDKMREMFGTEPTDRDFLFERSCNIILICTFRELEGKYIDYLSDLVGKKIVPVGPPFQDPLDEDDDHTELIEWLDKKEESSTVYVSFGSEYFLSKEEIEEIAHGLELSKVNFIWVARFPVGEKTRVEEALPEGFLERVGERGMVLDHLVPQAHILEHSSIGGFVSHCGWNSVMESLKFGVPIIAMPMQWDQPINARLVEEVGVGVEVKRDENGRLQREEIAKVIRKVVVEKSGESVRKKARELSENMRKKGEEEIDGVVEELVQLCQNRNAYK

SEQ ID NO: 617 - protein, 440 aa, Artificial Sequence
  engineered beta-1,2-glycosyltransferase encoded in plasmid pA29646
STLRVLMFPWLALGHVNPFLRLAKKLADRGFYIYLCSTPINLNSIKKRIPEKYSDSIQLVELHLPELPELPPHYHTTNGLPPHLNGTLKKALKMSAPNFSKILKNLKPDLLIYDFLQPWAEKVALSQNIPAVKLLTSGAALFSYFFHFVKKPGVEFPFPAIRLSKREQDKMREMFGTEPTDDDFLAEGSNQIMLMCTSRIIEAKYIDYLTELMNWKVVPVGPPFQDPLTEDDDDKELIDWLGTKDENSTVYVSFGSEYFLSKEDMEEIAFGLELSNVNFIWVARFPKGEEQNLEEALPKGFLERIGERGRVLDHLVPQAHILNHSSTGGFVSHCGWNSVMESIDFGVPIIAMPMQWDQPINARLIVELGVAVEIVRDENGKIHRGEIAQVIKDVIVGKTGENLRAKVRDISENLKLIRDEEMDAAAEELIQLCQNRNAYK

SEQ ID NO: 618 - protein, 440 aa, Artificial Sequence
  engineered beta-1,2-glycosyltransferase encoded in plasmid pA29647
SSIKVLMFPWLALGHVNPFLRLAKKLSKRNFHIYFCSTPINLSSIKKRLPEKYSLSIQLVELHLPSLPELPPHYHTTNGLPPHLNGTLKKAFDMAAPNFSNILKTLNPDLLIYDFLQPWAPKLALSQNIPAVQFLTSGAALFSYFLHFFKKPGVEFPFPEIRLSDREIDKMRRMFGTEPTEEDFLIERSSNIILICTFRELEGKYIDYLSVLTKKKVVPVGPPFQEPLDEDEDKTELIEWLDKKDESSTVYVSFGSEYFLSKEEIEEIAYGLELSKVNFIWVARFPKGEKISLEEALPEGFLERVGERGMVLDHLVPQAHILNHSSIGGFVSHCGWNSVMESIKFGVPIIAMPMQWDQPINARLVEEVGVGLEVKRDENGKLQREEIAKVIKEVVVEKSGENVRRKARELSEKIRKKGEEEIDEVVEELVQLCHNRNAYK

SEQ ID NO: 619 - protein, 440 aa, Artificial Sequence
  engineered beta-1,2-glycosyltransferase encoded in plasmid pA29648
STLRVLMFPWLALGHVNPFLRLAKKLADRGFLIYLCSTPINLKSIKKRIPEKYSDSIQLVELHLPELPELPPHYHTTNGLPPHLNGTLKKAFKMSAPNFSNILQNLKPDLVIYDFLQPWAEKVALSLNIPAVKFLTSGAALFSYFFNFVKKPGVEFPFPAIRLSKREQDKMREMFGTEPTDEDFLADGSDKIILMCTSRAIEAKYIDYLSELSQWKVVPVGPPFQEPLNNDDDDPELIDWLGTKDENSTVYVSFGSEYFLSKEDMEEIAYGLELSNVNFIWVARFPKGEEVNLEDALPKGFLERIGERGRVLDHLVPQAHILNHPSTGGFVSHCGWNSVMESIDFGVPIIAMPMQWDQPINARLVVELGVAVEIVRDDDGKIHRGEIAEVIKDVIVGKTGENLRRKVRDISENLKSRREEEMDGAAEELIQLCINRNAYK

SEQ ID NO: 620 - protein, 440 aa, Artificial Sequence
  engineered beta-1,2-glycosyltransferase encoded in plasmid pA29649
STIRVLMLPWLALGHVNPFLRLAKKLSKRNFHIYLCSTPINLNSIKKRIPEKYSLSIELVELHLPSLPELPPHYHTTNGLPPHLNGTLKKAFDMAAPSFSNILKTLKPDLVIYDFLQPWAPKIALSQNIPAVQFLTSGAALFSYFLHFLKNPGVEFPFPAIRLSDREIDKMRNMFGTEPTDKDFLLKRSCNIILICTFRELEGKYIDYLSVLAEKKIVPVGPPFQEPLDEDDDNTELIKWLDKKDESSTVYVSFGSEYFLSKEEIEEIAHGLELSKVNFIWVARFPVGEKINVEEALPEGFLERVGERGMVLDHLVPQAHILGHSSIGGFVSHCGWNSVMESMKFGVPIIAMPMQWDQPINARLVEEVGVGVEVKRDENGRLQREEIAQVIRKVVVEKSGEEVRKKARELSEKMRKKGEEEIDGVVEELVQLCDNRNAYK

SEQ ID NO: 621 - protein, 440 aa, Artificial Sequence
  engineered beta-1,2-glycosyltransferase encoded in plasmid pA29650
TTLRVLMFPWLALGHVNPFLRLAKKLADRGFSIYLCSTPINLNSIKKRIPEKYSDSIQLVELHLPELPELPPHYHTTNGLPPHLNGTLKKALKMSAPNFSKILQNLKPDLVIYDFLQPWAEKVALSQNIPAIKLLTSGAALFSYFFHFVRKPGVEFPFPAIRLSKREQDKMREMFGTEPTDEDFLAEGPMKIMLMCTSRAIEAKYIDYLTELTNKKVVPVGPPFQDPLTSDDDDKELIDWLGKKDENSTVYVSFGSEYFLSKEDMEEIAFGLELSNVNFIWVARFPKGEEQNLEDALPKGFLERIGDRGRVLDHLVPQAHILNHPSTGGFVSHCGWNSVMESIDFGVPIIAMPMQWDQPINARLMVELGVAVEIVRDDDGKIHRGEIAEVIKDVIVGKTGENLRRKVRDISENLKSKRGEEMDAAVEELIQLCHNRNAYK

SEQ ID NO: 622 - protein, 440 aa, Artificial Sequence
  engineered beta-1,2-glycosyltransferase encoded in plasmid pA29651
SSISVLMLPWLALGHVNPFLRLAKKLTKRNFHIYFCSTPINLNSIKKRLPEKYSLSIQLVELHLPSLPELPPHYHTTNGLPPHLNGTLKKAFDMAAPNFSNILKTLKPDLLIYDFLQPWAAKIALSQNIPAVQFLTSGAALFSYFLHFIKNPGVEFPFPEIRLSEREIDKMRNMFGTEPTEADFLFERSCNIILICTFREIEAKYIDYLSALTGKKIVPVGPPFQEPLDEDDDDTELIQWLDKKEESSTVYVSFGSEYFLSKEEMEEIAHGLELSKVNFIWVARFPVGEKIKVEEALPKGFLERVGERGMVLDHLVPQAHILGHSSIGGFVSHCGWNSVMESIKFGVPIIAMPMQWDQPINARLVEEVGVGVEVKRDENGRLEREEIAKVIREVVVEKIGEDVRRKARELSEKIRKKGEEEIDEVVEELVQLCGNRNAYK

SEQ ID NO: 623 - protein, 440 aa, Artificial Sequence
  engineered beta-1,2-glycosyltransferase encoded in plasmid pA29652
TTLRVLMFPWLALGHVNPFLRLAKKLADRGFLIYLCSTPINLSSIKKRIPEKYSDSIQLVELHLPELPELPPHYHTTNGLPPHLNGTLKKALKMSAPNFSKILQNLKPDLVIYDFLQPWAEKVALSHNIPAVPLLTSGAALFSYFFNFFKKPGVEFPFPAIRLSKREQDKMREMFGTEPTDEDFLSKGNCKIMLMCTSREIEAKYIDYLSELSKWKVVPVGPPFQDPLTNDDDDDELIDWLGKKDENSTVYVSFGSEYFLSKEDMEEIAFGLELSNVNFIWVARFPKGEEQNLEEVLPKGFLERIGERGRVLDHLVPQAHILNHPSTGGFISHCGWNSVMESIDFGVPIIAMPMQWDQPINARLMVELGVAVEIVRDDDGKIHREEIAEVLRDVITGKTGENLRKKVRDISENLKSRREEEMDAAAEELIQLCTNRNAYK

SEQ ID NO: 624 - protein, 440 aa, Artificial Sequence
  engineered beta-1,2-glycosyltransferase encoded in plasmid pA29653
STISVLMLPWLALGHVNPFLRLAKKLTKRNFHIYLCSTPINLSSIKKRIPEKYSLSIELVELHLPSLPELPPHYHTTNGLPPHLNGTLKKAFDMAAPNFSNILKTLNPDLVIYDFLQPWAPKVALSQNIPAVQFLTSGATLFSYFLHFFKNPGVEFPFPEIRLSDRELDKMRKMFGTEPTDADFLMERSSNIILICTFRELEGKYMDYLSSLVKKKIVPVGPPFQEPLDEDDDDTELIEWLDKKEESSTVYVSFGSEYFLSKEEIEEIAHGLELSKVNFIWVARFPVGEKISLEEALPEGFLERVGERGMVLDHLVPQAHILEHSSIGGFVSHCGWNSVMESMKFGVPIIAMPMQWDQPINARLVEEVGVGLEVKRDENGRLEREEIAKVIRKVVVEKSGENVRRKARELSEKIRKKGEEEIDEVVEELVQLCQNRNAYK

SEQ ID NO: 625 - protein, 440 aa, Artificial Sequence
  engineered beta-1,2-glycosyltransferase encoded in plasmid pA29654
TTLKVLMFPWLALGHVNPFLRLAKKLADRGFLIYLCSTPINLKSIKKRIPEKYSDSIQLVELHLPELPELPPHYHTTNGLPPHLNGTLRKALKMSAPNFSKILQNLKPDLVIYDFLQPWAEKVALSQNIPAVKLLTSGAALFSYFFHFVKKPGVEFPFPAIRLSKREQDKMREMFGTEPTDEDFLAEGSCQIILMCTSRAIEAKYIDYLTELINWKVVPVGPPFQDPLTNDDDDSELIDWLGKKDENSTVYVSFGSEYFLSKEDMEEIAFGLELSNVNFIWVARFPKGEEVNLEDALPKGFLERIGERGRVLDHLVPQAHILNHPSTGGFVSHCGWNSVMESIDFGVPIIAMPMQWDQPINARLMVELGVAVEIVRDDDGKIHREEIARVIKEVVVGKTGENLRRKVKEISENLKSKGDEEMDAVVEELIQLCRNRNAYK

SEQ ID NO: 626 - protein, 440 aa, Artificial Sequence
  engineered beta-1,2-glycosyltransferase encoded in plasmid pA29655
NSIRVLMFPWLALGHVNPFLRLAKKLSKRNFYIYLCSTPINLSSIKKRIPEKYSSSIELVELHLPSLPELPPHYHTTNGLPPHLNGTLKKAFDMAAPSFSNILKTLKPDLLIYDFLQPWAPKIALSQNIPAVQFLTSGAALFSYFLHFFKKPGVEFPFPAIRLSDREIDKMREMFGTEPTDRDFCIKRSCNIILICTFRELEGKYIDYLSVLSKKKIVPVGPPFQEPLDEDDDHTELIEWLDKKDESSTVYVSFGSEYFLSKEEIEEIAHGLELSKVNFIWVARFPVGEKIEVEEALPEGFLERVGERGMVLDHLVPQAHILGHSSIGGFVSHCGWNSVMESMKFGVPIIAMPMQWDQPINARLVEEVGVGVEVKRDENGRLQREEIAKVIRKVVVEKNGEDLRKKARELSEKIRMKGEEEIDEVVEELVQLCENRNAYK

SEQ ID NO: 627 - protein, 440 aa, Artificial Sequence
  engineered beta-1,2-glycosyltransferase encoded in plasmid pA29656
SKIKVLMLPWLALGHVNPFLRLAKKLTKRNFHIYFCSTPINLNSIKKRIPEKYSLSIELVELHLPSLPELPPHYHTTNGLPPHLNGTLKKAFEMAAPNFANILKTLNPDLVIYDFLQPWAPKIALSQNIPAVQFLTSGAALFSYFLHFFKKPGVEFPFPAIRLSEREIDKMRNMFGTEPTDKDFLIKRSCNIILICTFREIEGKYIDYLSVLAEKKVVPVGPPFQEPLDEDEDETELIQWLDKKDESSTVYVSFGSEYFLSKEEMEEIAHGLELSKVNFIWVARFPVGEKIEVEEALPEGFLERVGERGMVLDHLVPQAHILAHSSTGGFVSHCGWNSVMESIKFGVPIIAMPMQWDQPINARLVEEVGVGVEVKRDENGRLKREEIAQVIRKVVVEKSGEDVRRKARELSEKIRMKGEEEIDEVVEELVQLCFNRNAYK

SEQ ID NO: 628 - protein, 440 aa, Artificial Sequence
  engineered beta-1,2-glycosyltransferase encoded in plasmid pA29657
TTLRVLMFPWLALGHVNPFLRLAKKLADRGFLIYLCSTPINLKSIKKRIPEKYSDSIQLVELHLPELPELPPHYHTTNGLPPHLNGTLHKALKMSAPNFSKILQNLKPDLVIYDFLQPWAEKVALSQNIPAVKFLTSGAALFSYFFHFVKKPGVEFPFPAIRLSKREQDKMREMFGTEPTDEDFAAEGPAGIMLMCTSREIEAKYIDYLTELSNTKVVPVGPPFQDPLTEDDDDSELIDWLGKKDENSTVYVSFGSEYFLSKEDMEEIAFGLELSNVNFIWVARFPKGEEQNLEDALPKGFLERIGERGRVLDHLVPQAHILNHPSTGGFVSHCGWNSVMESIDFGVPIIAMPMQWDQPINARLMVELGVAVEIVRDDNGKIHRGEIAEVVKEVIGGKTGENLRKKVRDISENLKSKRDEEMDAAVEELIQLCGNRNAYK

SEQ ID NO: 629 - protein, 440 aa, Artificial Sequence
  engineered beta-1,2-glycosyltransferase encoded in plasmid pA29658
RTISVLMLPWLALGHVNPFLRLAKKLSKRNFHIYLCSTPINLNSIKPRLPEKYSLSIQLVELHLPSLPELPPHYHTTNGLPPHLNGTLKKAFDMAAPNFSNILKTLKPDLLIYDFLQPWAPKVALSQNIPAVQFLTSGAALFSYFLHFIKNPGVEFPFPEIRLSDREIDKMRNMFGTEPTDEDFLIERSSNIILICTFREIEGKYIDYLSDLTGKKIVPVGPPFQEPLDEDDDETELIEWLDKKDESSTVYVSFGSEYFLSKEEREEIAHGLELSKVNFIWVARFPKGEKIKLEEALPQGFLERVGERGMVLDHLVPQAHILGHSSIGGFVSHCGWNSVMESMKFGVPIIAMPMQWDQPINARLVEEVGVGVEVKRDENGKLEREEVAKVIREVVVEKIGESVRRKARELSENIKKKGEEEIDGVVEELVQLCTNRNAYK

SEQ ID NO: 630 - protein, 440 aa, Artificial Sequence
  engineered beta-1,2-glycosyltransferase encoded in plasmid pA29659
STLRVLMFPWLALGHVNPFLRLAKKLADRGFLIYLCSTPINLKSIKKRIPEKYSDSIQLVELHLPELPELPPHYHTTNGLPPHLNGTLKKAFKMSAPNFSNILKNLKPDLVIYDFLQPWAEKVALSLNIPAVKFLTSGAALFSYFFNFVKKPGVEFPFPAIRLSKREQDKMREMFGTEPTDEDFLADGSDKIILMCTSRAIEAKYIDYLSELSQWKVVPVGPPFQEPLNNDDDDEELIDWLGTKDENSTVYVSFGSEYFLSKEDMEEIAYGLELSNVNFIWVARFPKGEEVNLEDALPKGFLERIGERGRVLDHLVPQAHILNHPSTGGFVSHCGWNSVMESIDFGVPIIAMPMQWDQPINARLVVELGVAVEIVRDDDGKIHRGEIAEVIKDVIVGKTGENLRAKVRDISENLKSRREEEMDGAAEELIQLCRNRNAYK

SEQ ID NO: 631 - protein, 440 aa, Artificial Sequence
  engineered beta-1,2-glycosyltransferase encoded in plasmid pA29660
QTLRVLMFPWLALGHVNPFLRIAKQLADRGFVIYLCSTAINLESIKKRIPEKYSNSIHLVELALPELPELPPHYHTTNGLPPHLNGTLHKALKMSAPNFSKILQNLKPDLVLYDFLQPWAEKVALEQGIPAVKLLTSGAALFSYFFHFLKKPGHEFPFPAIYLRKIEQVKMREMMGKEPDDEDFLAPGNAGIMLMCTSRVIEAKYIDYLSELTNKKVVPVGPPFQDPLTEDIDDPELIDWLDTKPENSTVFVSFGSEYFLSREDMEEVAFGLELSNVNFIWVARFPKGEEQNLEEALPKGFLERIGERGRVLDHLVPQAHILNHPSTGGFVSHCGWNSVMESIDFGVPIIAMPMQWDQPINARLMVELGVAVEIVRDDDGKIHRGEIAQVLKDVISGPTGEILRAKVRDISKRLRARREEEMNAAAEELIQLCRNRNAYK

SEQ ID NO: 632 - protein, 440 aa, Artificial Sequence
  engineered beta-1,2-glycosyltransferase encoded in plasmid pA29661
QTLRVLMFPWLALGHINPFLRIAKQLADRGFVIYLCSTAINLESIKKRIPEKYSNSIHLVELALPELPELPPHYHTTNGLPPHLNGTLHKALKMSAPNFSKILQNLKPDLVLYDFLQPWAEKVALEQGIPAVKLLTSGAALFSYFFNFLKKPGHEFPFPAIYLRKYEQVKMREMMGKEPKDEDFLAPGNAQIMLMCTSRVIEAKYIDYLSELTNWKVVPVGPPFQDPLTEDIDDPELIDWLDTKPENSTVFVSFGSEYFLSREDMEEVAFGLELSNVNFIWVARFPKGEEQNLEDALPKGFLERIGERGRVLDHLVPQAHILNHPSTGGFVSHCGWNSVMESIDFGVPIIAMPMQWDQPINARLLVELGVAVEIVRDDDGKIHRGEIAQTLKDVISGPTGEILRAKVRDISKRLRARREEEMNAAAEELIQLCRNRNAYK

SEQ ID NO: 633 - protein, 440 aa, Artificial Sequence
  engineered beta-1,2-glycosyltransferase encoded in plasmid pA29662
QTLRVLMFPWLALGHINPFLRIAKQLADRGFVIYLCSTAINLESIKKRIPEKYSNSIHLVELALPELPELPPHYHTTNGLPPHLNGTLKKALKMSAPNFSKILQNLKPDLVLYDFLQPWAEKVANEQGIPAVKLLTSGAALFSYFFNFVKKPGHEFPFPAIYLRKIEQVKMREMMEKEPKEEDFLAPGNAQIMLMCTSRVIEAKYIDYLTELTNWKVVPVGPPFQDPLTEDIDDPELIDWLDTKPENSTVFVSFGSEYFLSREDMEEIAFGLELSNVNFIWVARFPKGEEQNLEDALPKGFLERIGDRGRVLDHLVPQAHILNHPSTGGFISHCGWNSVMESIDFGVPIIAMPMQWDQPINARLMVELGVAVEIVRDDDGKIHRGEIAEVLKDVISGPTGEILRAKVRDISKRLRARREEEMNAAAEELIQLCRNRNAYK

SEQ ID NO: 634 - protein, 440 aa, Artificial Sequence
  engineered beta-1,2-glycosyltransferase encoded in plasmid pA29664
QTLRVLMFPWLALGHVNPFLRIAKQLADRGFVIYLCSTAINLESIKKRIPEKYSNSIHLVELALPELPELPPHYHTTNGLPPHLNGTLHKALKMSAPNFSKILQNLKPDLVLYDFLQPWAEKVALEQGIPAVPFITSGAALFSYFFNFLKRPGHEFPFPAIRLSKREQDKMRELFGTEPTEEDFLAPGNAGIVLICTSRVIEAKYLDYCTELTNVKVVPVGPPFQDPLTEDIDDPELIDWLDTKPENSTVFVSFGSEYFLSREDMEEVAFGLELSNVNFIWVARFPKGEEQNLEDVLPKGFLERVGDRGRVLDHLVPQAHILNHPSTGGFVSHCGWNSVMESIDFGVPIIAMPMQWDQPINARLLVELGVAVEIVRDEDGRIHRGEIAQVLKDVISGPTGEILRAKVRDISKRLRARREEEMNAAAEELIQLCRNRNAYK

SEQ ID NO: 635 - protein, 440 aa, Artificial Sequence
  engineered beta-1,2-glycosyltransferase encoded in plasmid pA29665
QTLRVLMFPWLALGHINPFLRIAKQLADRGFVIYLCSTAINLESIKKRIPEKYSNSIHLVELALPELPELPPHYHTTNGLPPHLNGTLHKALKMSAPNFSKILQNLKPDLVLYDFLQPWAEKVALEQGIPAVRLLTSGAALFSYFFNFLKRPGHEFPFPAIRLSKREQDKMRELFGTEPTEEDFLAPGNAGIMLICTSRVIEAKYIDYCTELTNVKVVPVGPPFQDPLTEDIDDPELIDWLDTKPENSTVFVSFGSEYFLSREDMEEVAFGLELSNVNFIWVARFPKGEEQNLEDVLPKGFLERIGDRGRVLDHLVPQAHILNHPSTGGFVSHCGWNSVMESIDFGVPIIAMPMQWDQPINARLLVELGVAVEIVRDEDGRIHRGEIAQVLKDVISGPTGEILRAKVRDISKRLRARREEEMNAAAEELIQLCRNRNAYK

SEQ ID NO: 636 - protein, 440 aa, Artificial Sequence
  engineered beta-1,2-glycosyltransferase encoded in plasmid pA29666
QTLRVLMFPWLALGHINPFLRIAKQLADRGFVIYLCSTAINLESIKKRIPEKYSNSIHLVELALPELPELPPHYHTTNGLPPHLNGTLHKALKMSAPNFSKILQNLKPDLLLYDFLQPWAEKVANEQGIPAVKFITSGAALFSYFFNFLKRPGHEFPFPAIRLSKREQDKMREMFGTEPTEEDFLAPGNAQIMLMCTSRVIEAKYIDYLTELTNKKVVPVGPPFQDPLTEDIDDPELIDWLDTKPENSTVFVSFGSEYFLSREDMEEVAFGLELSNVNFIWVARFPKGEEQNLEDVLPKGFLERIGDRGRVLDHLVPQAHILNHPSTGGFVSHCGWNSVMESIDFGVPIIAMPMQWDQPINARLLVELGVAVEIVRDEDGRIHRGEIAQVLKDVISGPTGEILRAKVRDISKRLRARREEEMNAAAEELIQLCRNRNAYK

SEQ ID NO: 637 - protein, 440 aa, Artificial Sequence
  engineered beta-1,2-glycosyltransferase encoded in plasmid pA29667
TTLRVLMFPWLALGHVNPFLRLAKKLADRGFLIYLCSTPINLKSIKKRIPEKYSDSIQLVELHLPELPELPPHYHTTNGLPPHLNGTLQKALKMSAPNFSKILQNLKPDLVIYDFLQQWAEKVALEQNIPAVKLLTSGAALFSYFFNFVKKPGVEFPFPAIRLSKREQDKMREMFGTEPTDEDFFAEGNMQIMLMCTSRTIEAKYIDYLTELSNWKVVPVGPPFQDPLTNDADDVELIDWLGTKDENSTVYVSFGSEYFLSKEDMEEIAFGLELSNVNFIWVARFPKGEEQNLEDALPKGFLERIGERGRVLDHLVPQAHILNHPSTGGFISHCGWNSVMESIDFGVPIIAMPMQWDQPINARLMVELGVAVEIVRDDDGKIHRGEIAETLKDVITGKTGENLRAKVRDISKNLKSIRGEEMDAAAEELIQLCKNRNAYK

SEQ ID NO: 638 - protein, 440 aa, Artificial Sequence
  engineered beta-1,2-glycosyltransferase encoded in plasmid pA29668
STLRVLMFPWLALGHVNPYLRLAKKLADRGFLIYLCSTPINLNSIKKRIPEKYSLSIQLVELHLPELPELPPHYHTTNGLPPHLNGTLKKALKMSAPNFSKILQNLKPDLLIYDFLQPWAEKVALSQNIPAVKLLTSGAALFSYFFHFVKKPGVEFPFPAIRLSKREQDKMREMFGTEPTDEDFLAEGSMGIMLMCTSREIEAKYIDYLSELSNWKVVPVGPPFQDPLTEDDDDVELIDWLGKKDENSTVYVSFGSEYFLSKEDMEEIAFGLELSNVNFIWVARFPKGEEQNLEDALPKGFLERIGERGRVLDHLVPQAHILNHPSTGGFVSHCGWNSVMESIDFGVPIIAMPMQWDQPINARLMVELGVAVEIVRDDDGKIHRGEIAQVIKEVITGKTGENLRAKVRDISENLKSIREEEMDAAAEELIQLCKNRNAYK

SEQ ID NO: 639 - protein, 440 aa, Artificial Sequence
  engineered beta-1,2-glycosyltransferase encoded in plasmid pA29669
STLRVLMFPWLALGHVNPFLRLAKKLADRGFLIYLCSTPINLESIKKRIPEKYSDSIQLVELHLPELPELPPHYHTTNGLPPHLNGTLQKALKMSAPNFSKILQNLKPDLVIYDFLQPWAEKVALEQNIPAVKLLTSGAALFSYFFNFVKKPGVEFPFPAIRLSKREQDKMREMFGTEPTEDDFLADGNTQIMLMCTSRIIEAKYIDYLSELTNWKVVPVGPPFQDPLTNDDDDVELIDWLGTKDENSTVYVSFGSEYFLSKEDMEEIAFGLELSNVNFIWVARFPKGEEQNLEDALPKGFLERIGDRGRVLDHLVPQAHILNHPSTGGFISHCGWNSVMESIDFGVPIIAMPMQWDQPINARLIVELGVAVEIVRDDDGKIHREEIAETLKDVITGKIGENLRAKVRDISKNLKSIRGEEMDAAAEELIQLCKNRNAYK

SEQ ID NO: 640 - protein, 440 aa, Artificial Sequence
  engineered beta-1,2-glycosyltransferase encoded in plasmid pA29671
TTLRVLMFPWLALGHVNPFLRVAKKLADRGFLIYLCSTPINLKSIKKRIPEKYSDSIELVELHLPELPELPPHYHTTNGLPPHLNGTLKKALKMSAPNFSKILQNLKPDLVIYDFLQQWAEKVALEQNIPAVKLLTSGAALFSYFFNFLKKPGVEFPFPAIRLSKREQDKMREMFGTEPTDEDFLADGNMQIMLMCTSRAIEAKYIDYLTELSNWKVVPVGPPFQDPLTNDADDMELIDWLGTKDENSTVYVSFGSEYFLSKEDMEEIAFGLELSNVNFIWVARFPKGEEQNLEDALPKGFLERIGERGRVLDHLVPQAHILNHPSTGGFISHCGWNSVMESIDFGVPIIAMPMQWDQPINARLIVELGVAVEIVRDDDGKIHRGEIAEVLKDVITGKTGENLRAKVRDISKNLKSIREEEMDAAAEELIQLCKNRNAYK

SEQ ID NO: 641 - protein, 440 aa, Artificial Sequence
  engineered beta-1,2-glycosyltransferase encoded in plasmid pA29672
TTLRVLMFPWLALGHVNPFLRLAKKLADRGFLIYLCSTPINLNSIKKRIPEKYSDSIQLVELHLPELPELPPHYHTTNGLPPHLNGTLQKALKMSAPNFSKILQNLKPDLVIYDFLQPWAEKVALSQNIPAVRLLTSGAALFSYFFHFVKKPGVEFPFPAIRLSEREQDKMREMFGTEPTDEDFFAEGNCQIMLVCTSRAIEAKYIDYLSELSNWKVVPVGPPFQDPLTNDDDDSELIDWLGKKDENSTVYVSFGSEYFLSKEDMEEIAFGLELSNVNFIWVARFPKGEEVNLEDALPKGFLERIGERGRVLDHLVPQAHILNHPSTGGFVSHCGWNSVMESIDFGVPIIAMPMQWDQPINARLMVELGVAVEIVRDDNGKIHRGEIAQVLKDVITGKTGENLRAKVRDISKNLKSIREEEMDAAAEELIQLCKNRNAYK

SEQ ID NO: 642 - protein, 440 aa, Artificial Sequence
  engineered beta-1,2-glycosyltransferase encoded in plasmid pA29673
STLKVLMFPWLALGHVNPFLRLAKKLADRGFLIYLCSTPINLKSIKNRIPEKYSSSIQLVELHLPELPELPPHYHTTNGLPPHLNGTLQKALKMSAPNFSKILKNLKPDLVIYDFLQQWAEKVALEQNIPAVKLLTSGAALFSYFFNFVKKPEVEFPFPAIRLSKREQDKMREMFGTEPTEDDFFAEGNTQIILMCTSRAIEAKYIDYLTELSNWKVVPVGPPFQDPLTNDDDDVELIDWLGKKDENSTVYVSFGSEYFLSKEDMEEIAFGLELSNVNFIWVARFPKGEEQNLEDVLPKGFLERIGERGRVLDHLVPQAHILNHPSTGGFISHCGWNSVMESIDFGVPIIAMPMQWDQPINARLMVELGVAVEIVRDDDGKIHRGEIAETLKDVITGKTGENLRAKVRDISKNLKSIRGEEMDAAAEELIQLCKNRNAYK

SEQ ID NO: 643 - protein, 440 aa, Artificial Sequence
  engineered beta-1,2-glycosyltransferase encoded in plasmid pA29675
TTLRVLMFPWLALGHVNPFLRLAKKLADRGFYIYLCSTPINLSSIKKRIPEKYSDSIQLVELHLPELPELPPHYHTTNGLPPHLNGTLKKALKMSAPNFSKILQNLKPDLVIYDFLQPWAEKVALEQNIPAVKLLTSGAALFSYFFNFVKKPGVEFPFPAIRLSKREQDKMREMFGTEPTDEDFLAEGNMQIVLMCTSRAIEAKYIDYLTELSNWKVVPVGPPFQDPLTNDDDDVELIDWLGKKDENSTVYVSFGSEYFLSKEDMEEIAFGLELSNVNFIWVARFPKGEEQNLEDVLPKGFLERIGERGRVLDHLVPQAHILNHPSTGGFVSHCGWNSVMESIDFGVPIIAMPMQWDQPINARLVVELGVAVEIVRDDDGKIHRGEIAEVLKSVITGKIGENLRAKVRDISENLKSRRGEEMDAAAEELIQLCKNRNAYK

SEQ ID NO: 644 - protein, 440 aa, Artificial Sequence
  engineered beta-1,2-glycosyltransferase encoded in plasmid pA29676
STLRVLMFPWLALGHVNPFLRLAKKLADRGFLIYLCSTPINLKSIKKRIPEKYSDSIQLVELHLPELPELPPHYHTTNGLPPHLNGTLKKALKMSAPNFSKILQNLKPDLLIYDFLQPWAEKVALEQNIPAVKLLTSGAALFSYFFHFLKKPGVEFPFPAIRLSKREQDKMREMFGTEPTDEDFLADGNSQIMLMCTSRAIEAKYIDYLSELSNWKVVPVGPPFQDPLTEDDDDVELIDWLGTKDENSTVYVSFGSEYFLSKEDMEEIAFGLELSNVNFIWVARFPKGEEQNLEDALPKGFLERIGDRGRVLDHLVPQAHILNHPSTGGFISHCGWNSVMESIDFGVPIIAMPMQWDQPINARLIVELGVAVEIVRDDEGKIHRGEIAEVLKDVIVEKTGENLRAKVRDISKNLKSKREEEMDAAAEELIQLCKNRNAYK

SEQ ID NO: 645 - protein, 440 aa, Artificial Sequence
  engineered beta-1,2-glycosyltransferase encoded in plasmid pA29677
STLRVLMFPWLALGHVNPFLRLAKKLADRGFLIYLCSTPINLNSIKKRIPEKYSDSIQLVELHLPELPELPPHYHTTNGLPPHLNGTLKKALKMSAPNFSKILKNLKPDLVIYDFLQPWAEKVALSQNIPAVKLLTSGAALFSYFFNFVKKPGVEFPFPAIRLSKREQDKMREMFGTEPTDEDFLAEGNMGIMLMCTSREIEAKYIDYLTELTNWKVVPVGPPFQDPLTEDDDDMELIDWLGTKDENSTVYVSFGSEYFLSKEDMEEIAFGLELSNVNFIWVARFPKGEEVNLEDALPKGFLERIGERGRVLDHLVPQAHILNHPSTGGFVSHCGWNSVMESIDFGVPIIAMPMQWDQPINARLMVELGVAVEIVRDDDGKIHRGEIAQVLKDVITGKTGENLRKKVRDISENLKSIRGEEMDAAAEELIQLCKNRNAYK

SEQ ID NO: 646 - protein, 440 aa, Artificial Sequence
  engineered beta-1,2-glycosyltransferase encoded in plasmid pA29678
SSLKVLMFPWLALGHVNPFLRLAKKLADRGFLIYLCSTPINLKSIKKRIPEKYSDSIELVELHLPELPELPPHYHTTNGLPPHLNGTLQKALKMSAPNFSKILQNLKPDLVIYDFLQPWAEKVALEQNIPAVKLLTSGAALFSYFFNFVKKPGVEFPFPAIRLSKREQDKMREMFGTEPTDEDFFAKGNTQIMLMCTSREIEAKYIDYLSELTNWKVVPVGPPFQDPLTEDDDDVELIDWLGTKDENSTVYVSFGSEYFLSKEDMEEIAFGLELSNVNFIWVARFPKGEEQNLEDALPKGFLERIGERGRVLDHLVPQAHILNHPSTGGFISHCGWNSVMESIDFGVPIIAMPMQWDQPINARLMVELGVAVEIVRDDDGKIHRGEIAEVLKEVIAGKIGENLRAKVRDISKNLKSKRGEEMDAAAEELIQLCKNRNAYK

SEQ ID NO: 647 - protein, 440 aa, Artificial Sequence
  engineered beta-1,2-glycosyltransferase encoded in plasmid pA29679
TTLRVLMFPWLALGHVNPFLRLAKKLADRGFLIYLCSTPINLKSIKKRIPEKYSDSIQLVELHLPELPELPPHYHTTNGLPPHLNGTLKKALKMSAPNFSKILQNLKPDLLIYDFLQQWAEKVALEQNIPAVKLLTSGAALFSYFFNFVKKPGVEFPFPAIRLSKREQDKMREMFGTEPTEEDFFVDGNMQIMLMCTSRIIEAKYIDYLTELSNWKVVPVGPPFQDPLTNDADDVELIDWLGTKDENSTVYVSFGSEYFLSKEDMEEIAFGLELSNVNFIWVARFPKGEEQNLEDALPKGFLERIGERGRVLDHLVPQAHILNHPSTGGFVSHCGWNSVMESIDFGVPIIAMPMQWDQPINARLIVELGVAVEIVRDDDGKIHRGEIAETLKGVITGKIGENLRAKVRDISKNLKSIRDEEMDAAAEELIQLCKNRNAYK

SEQ ID NO: 648 - protein, 440 aa, Artificial Sequence
  engineered beta-1,2-glycosyltransferase encoded in plasmid pA29680
SSLRVLMFPWLALGHVNPFLRLAKKLADRGFYIYLCSTPINLNSIKKRIPEKYSDSIQLVELHLPELPELPPHYHTTNGLPPHLNGTLKKALKMSAPNFSKILQNLKPDLVIYDFLQQWAEKVALSQNIPAVKLLTSGAALFSYFFHFVKKPGVEFPFPAIRLSKREQDKMREMFGTEPTDEDFLAEGNSQIMLMCTSREIEAKYIDYLSELSNKKVVPVGPPFQDPLNNDDDDVELIDWLGKKDENSTVYVSFGSEYFLSKEDMEEIAFGLELSNVNFIWVARFPKGEEQNLEDALPKGFLERIGDRGRVLDHLVPQAHILNHPSTGGFVSHCGWNSVMESIDFGVPIIAMPMQWDQPINARLMVELGVAVEIVRDDDGKIHREEIAQVLKDVITGKTGENLRAKVRDISKNLKSIRGEEMDAAAEELIQLCKNRNAYK

SEQ ID NO: 649 - protein, 440 aa, Artificial Sequence
  engineered beta-1,2-glycosyltransferase encoded in plasmid pA29681
TTLKVLMFPWLALGHVNPFLRVAKKLADRGFLIYLCSTPINLKSIKKRIPEKYSDSIQLVELHLPELPELPPHYHTTNGLPPHLNGTLQKALKMSAPNFSKILQNLKPDLVIYDFLQQWAEKVALEQNIPAVKLLTSGAALFSYFFNFVKKPGVEFPFPAIRLSKREQDKMREMFGTEPTDVDFFAEGNMQIMLMCTSRDIEAKYIDYLTELINWKVVPVGPPFQDPLTNDADDVELIDWLGKKDENSTVYVSFGSEYFLSKEDMEEIAFGLELSNVNFIWVARFPKGEEQNLEDVLPKGFLERIGERGRVLDHLVPQAHILNHPSTGGFISHCGWNSVMESIDFGVPIIAMPMQWDQPINARLMVELGVAVEIVRDDDGKIHRGEIAETLKDVITGKTGENLRAKVRDISENLKSIRGEEMDAAAEELIQLCKNRNAYK

SEQ ID NO: 650 - protein, 440 aa, Artificial Sequence
  engineered beta-1,2-glycosyltransferase encoded in plasmid pA29682
STLRVLMFPWLALGHVNPFLRLAKKLADRGFLIYLCSTPINLNSIKKRIPEKYSDSIHLVELHLPELPELPPHYHTTNGLPPHLNGTLQKALKMSAPNFSKILQNLKPDLVIYDFLQQWAEKVALEQNIPAVKLLTSGAALFSYFFNFVKKPGVEFPFPAIRLSKREQDKMREMFGTEPTDEDFLADGNSQIMLMCTSRTIEAKYIDYLTELSNWKVVPVGPPFQDPLTNDDDDMELIDWLGTKDENSTVYVSFGSEYFLSKEDMEEIAFGLELSNVNFIWVARFPKGEEQNLEDALPKGFLERIGERGRVLDHLVPQAHILNHPSTGGFISHCGWNSVMESIDFGVPIIAMPMQWDQPINARLLVELGVAVEIVRDEDGKIHREEIAEVLKDVITGETGENLRAKVRDISKNLKSKRGEEMDAAAEELIQLCKNRNAYK

SEQ ID NO: 651 - protein, 440 aa, Artificial Sequence
  engineered beta-1,2-glycosyltransferase encoded in plasmid pA29683
STLRVLMFPWLALGHVNPYLRLAKKLADRGFLIYLCSTPINLNSIKKRIPEKYSLSIQLVELHLPELPELPPHYHTTNGLPPHLNGTLKKALKMSAPNFSKILQNLKPDLLIYDFLQPWAEKVALSQNIPAVKLLTSGAALFSYFFHFVKKPGVEFPFPAIRLSKREQDKMREMFGTEPTDEDFLAEGSMGIMLMCTSREIEAKYIDYLTELSNWKVVPVGPPFQDPLTEDDDDVELIDWLGKKDENSTVYVSFGSEYFLSKEDMEEIAFGLELSNVNFIWVARFPKGEEQNLEDALPKGFLERIGERGRVLDHLVPQAHILNHPSTGGFVSHCGWNSVMESIDFGVPIIAMPMQWDQPINARLMVELGVAVEIVRDDDGKIHRGEIAQVIKEVITGKTGENLRAKVRDISENLKSIREEEMDAAAEELIQLCKNRNAYK

SEQ ID NO: 652 - protein, 440 aa, Artificial Sequence
  engineered beta-1,2-glycosyltransferase encoded in plasmid pA29684
TTLRVLMFPWLALGHVNPFLRLAKKLADRGFLIYLCSTPINLKSIKKRIPEKYSNSIQLVELHLPELPELPPHYHTTNGLPPHLNGTLKKALKMSAPNFSKILQNLKPDLLIYDFLQPWAEKVALEQNIPAVKLLTSGAALFSYFFNFVKKPGIEFPFPAIRLSKREQDKMREMFGTEPTDEDFFAEGNMQIMLMCTSRAIEAKYIDYLTELSNWKVVPVGPPFQDPLTNDDDDVELIDWLGTKDENSTVYVSFGSEYFLSKEDMEEIAFGLELSNVNFIWVARFPKGEEQNLEDALPKGFLERIGERGRVLDHLVPQAHILNHPSTGGFVSHCGWNSVMESIEFGVPIIAMPMQWDQPINARLMVELGVAVEIVRDDDGKIHRGEIAEVLKDVITGKTGENLRAKVRDISKNLKSIREEEMDAVAEELIQLCKNRNAYK

SEQ ID NO: 653 - protein, 440 aa, Artificial Sequence
  engineered beta-1,2-glycosyltransferase encoded in plasmid pA29685
TTLRVLMFPWLALGHVNPFLRLAKKLADRGFLIYLCSTPINLSSIKKRIPEKYSDSIQLVELHLPELPELPPHYHTTNGLPPHLNGTLHKALKMSAPNFSKILQNLKPDLVIYDFLQQWAEKVALEQNIPAVKLLTSGAALFSYFFNFLRKPGVEFPFPAIRLSKREQDKMREMFGTEPTDEDFLADGNMQIMLMCTSRTIEAKYIDYLSELSNWKVVPVGPPFQDPLTNDADEVELIDWLGTKDENSTVYVSFGSEYFLSKEDMEEVAFGLELSNVNFIWVARFPKGEEQNLEDALPKGFLERIGERGRVLDHLVPQAHILNHPSTGGFISHCGWNSVMESIDFGVPIIAMPMQWDQPINARLMVELGVAVEIVRDDDGKIHRGEIAETLKDVITGKTGENLRAKVRDISKNLKSIRGEEMDAAAEELIQLCKNRNAYK

SEQ ID NO: 654 - protein, 440 aa, Artificial Sequence
  engineered beta-1,2-glycosyltransferase encoded in plasmid pA29686
STISVLMLPWLALGHVNPFLRLAKKLTKRNFHIYLCSTPINLSSIKKRIPEKYSLSIELVELHLPSLPELPPHYHTTNGLPPHLNGTLKKAFEMAAPNFSNILKTLNPDLVIYDFLQPWAPKIALSQNIPAVQFLTSGAALFSYFLHFFKNPGVEFPFPAIRLSEREIDKMREMFGTEPTDRDFLIKRSCNIILICTFREIEGKYIDYLSVLVEKKIVPVGPPFQEPLDEDDDHTELIQWLDKKDESSTVYVSFGSEYFLSKEEIEEIAHGLELSKVNFIWVARFPVGEKIRVEEALPEGFLERVGERGMVLDHLVPQAHILGHSSTGGFVSHCGWNSVMESMKFGVPIIAMPMQWDQPINARLVEEVGVGVEVKRDENGRLQREEIAKVIRKVVVEKSGEDVRKKARELSEKMRMKGEEEIDEVVEELVQLCKNRNAYK

SEQ ID NO: 655 - protein, 440 aa, Artificial Sequence
  engineered beta-1,2-glycosyltransferase encoded in plasmid pA29687
STLRVLMFPWLALGHVNPYLRVAKKLADRGFHIYLCSTPINLNSIKKRIPEKYSLSIELVELHLPSLPELPPHYHTTNGLPPHLNGTLKKALKMSAPNFSKILQTLKPDLLIYDFLQPWAPKVALSQNIPAIKFLTSGAALFSYFFHFVKKPGVEFPFPAIRLSKREQDKMREMFGTEPTDEDFLAEGNTKIMLMCTSREIEAKYIDYLSELSNKKVVPVGPPFQEPLTEDDDDSELIDWLGKKDENSTVYVSFGSEYFLSKEDLEEIAYGLELSNVNFIWVARFPKGEEVNLEDALPKGFLERIGERGRVLDHLVPQAHILNHPSTGGFVSHCGWNSVMESIDFGVPIIAMPMQWDQPINARLVVELGVAVEIVRDDDGKIHREEIAQVIKDVITEKTGENLRKKVRDISENLKSKREEEMDAVVEELIQLCKNRNAYK

SEQ ID NO: 656 - protein, 440 aa, Artificial Sequence
  engineered beta-1,2-glycosyltransferase encoded in plasmid pA29688
STIKVLMFPWLALGHVNPFLRLAKKLSKRNFHIYFCSTPINLSSIKKRLPEKYSLSIQLVELHLPSLPELPPHYHTTNGLPPHLNGTLKKAFDMAAPSFSNILKTLNPDLLIYDFLQPWAPKIALSQNIPAVQFLTSGATLFSYFLHFFKKPGVEFPFPSIRLSDRELDKMRNMFGTEPTEEDFLIERSSNIILICTFREIEGKYIDYLSVLTNKKIVPVGPPFQDPLEEDEDETELIEWLDKKDESSTVYVSFGSEYFLSKEEMEEIAYGLELSNVNFIWVARFPKGEKIKLEEALPEGFLERVGERGMVLDHLVPQAHILGHSSIGGFVSHCGWNSVMESMKFGVPIIAMPMQWDQPINARLVEEVGVGVEVKRDENGRLEREEIAKVIREVVVEKNGENLRRKARELSEKIRKKGEEEIDEVVEELVQLCKNRNAYK

SEQ ID NO: 657 - protein, 440 aa, Artificial Sequence
  engineered beta-1,2-glycosyltransferase encoded in plasmid pA29689
STLRVLMFPWLALGHVNPYLRVAKKLADRGFHIYLCSTPINLNSIKKRIPEKYSDSIELVELHLPPLPELPPHYHTTNGLPPHLNGTLKKAFKMSAPNFSKILQTLKPDLLIYDFLQPWAPKVALSQNIPAVKFLTSGAALFSYFFHFVKKPGVEFPFPAIRLSKREQDKMREMFGTEPTEEDFLAEGSTKIILMCTSREIEGKYIDYLSELSNKKVVPVGPPFQEPLTEDDDDSELIDWLGKKDENSTVYVSFGSEYFLSKEDMEEIAYGLELSNVNFIWVARFPKGEEVNLEDALPKGFLERIGERGRVLDHLVPQAHILNHPSTGGFVSHCGWNSVMESIDFGVPIIAMPMQWDQPINARLMVELGVAVEIVRDENGKIHREEIAQVIKKVITEKTGENLRKKVREISENLKSKRDEEMDAVVEELIQLCKNRNAYK

SEQ ID NO: 658 - protein, 440 aa, Artificial Sequence
  engineered beta-1,2-glycosyltransferase encoded in plasmid pA29690
KSISVLMLPWLALGHVNPFLRLAKKLAKRNFHIYFCSTPINLNSIKKRLPEKYSLSIQLVELHLPSLPELPPHYHTTNGLPPHLNGTLKKAFDMAAPSFSNILKTLNPDLLIYDFLQPWAPKIALSLNIPAVQFLTSGAALFSYFLHFLKNPGEEFPFPEIRLSDREIDKMRNMFGTEPTDRDFLIERSCNIILICTFRELEGKYIDYLSVLAEKKIVPVGPPFQDPLDEDDDHTELIEWLDKKEESSTVYVSFGSEYFLSKEEIEEIAHGLELSKVNFIWVARFPVGEKISLEEALPKGFLERVGERGMVLDHLVPQAHILGHSSIGGFVSHCGWNSVMESMKFGVPIIAMPMQWDQPINARLVEEVGVGVEVKRDENGRLQREEIAKVIRKVVVEKSGESVRRKARELSEKMRKKGEEEIDGVVEELVQLCRNRNAYK

SEQ ID NO: 659 - protein, 440 aa, Artificial Sequence
  engineered beta-1,2-glycosyltransferase encoded in plasmid pA29692
STLRVLMFPWLALGHVNPYLRVAKKLADRGFHIYLCSTPINLNSIKKRIPEKYSDSIELVELHLPSLPELPPHYHTTNGLPPHLNGTLKKAFKMSAPNFSKILQTLKPDLLIYDFLQPWAPKVALSQNIPAVKFLTSGAALFSYFFHFVKKPGVEFPFPAIRLSKREQDKMREMFGTEPTEEDFLAEGSTKIMLMCTSREIEGKYIDYLSELSNKKVVPVGPPFQEPLTEDDDDSELIDWLGKKDENSTVYVSFGSEYFLSKEDMEEIAYGLELSNVNFIWVARFPKGEEVNLEDALPKGFLERIGERGRVLDHLVPQAHILNHPSTGGFVSHCGWNSVMESIDFGVPIIAMPMQWDQPINARLMVELGVAVEIVRDENGKIHREEIAQVIKKVITEKTGENLRKKVREISENLKSKREEEMDAVVEELIQLCKNRNAYK

SEQ ID NO: 660 - protein, 440 aa, Artificial Sequence
  engineered beta-1,2-glycosyltransferase encoded in plasmid pA29693
RSIRVLMFPWLALGHVNPFLRLAKKLTKRNFYIYFCSTPINLSSIKKRIPEKYSLSIQLVELHLPSLPELPPHYHTTNGLPPHLNGTLKKAFDMAAPSFSNILKTLKPDLLIYDFLQPWAPKAALSQNIPAVQFLTSGAALFSYFFHFFKNPGVEFPFPEIRLSDREIDKMRHMFGTEPTDRDFEFERSSNIILICTFREIEGKYIDYLSSLLGKKIVPVGPPFQEPLDEDEDDSELIEWLDKKDESSTVYVSFGSEYFLSKEEMEEIAHGLELSKVNFIWVARFPVGEKIKLEEALPEGFLERVGERGMVLDHLVPQAHILGHSSIGGFVSHCGWNSVMESIKFGVPIIAMPMQWDQPINARLVEEVGVGVEVKRDENGRLEREEIAKVIKEVVVEKNGENVRRKARELSENIRKKGEEEIDEVVEELVQLCKNRNAYK

SEQ ID NO: 661 - protein, 440 aa, Artificial Sequence
  engineered beta-1,2-glycosyltransferase encoded in plasmid pA29694
STISVLMLPWLALGHVNPFLRLAKKLTKRNFHIYLCSTPINLNSIKKRIPEKYSLSIELVELHLPSLPELPPHYHTTNGLPPHLNGTLKKAFDMAAPNFSNILQTLNPDLVIYDFLQPWAPKLALSQNIPAVQFLTSGAALFSYFLHFFKNPGVEFPFPEIRLSDREKDKMRNMFGTEPTDVDFLMKRSCNIILICTFRELEGKYIDYLSVLVGKKIVPVGPPFQEPLDEDDDDTELIQWLDKKEESSTVYVSFGSEYFLSKEEIEEIAHGLELSKVNFIWVARFPVGEKIRVEEALPEGFLERVGERGMVLDHLVPQAHILAHSSTGGFVSHCGWNSVMESLKFGVPIIAMPMQWDQPINARLVEEVGVGVEVKRDENGRLQREEIAKVIRKVVVEKSGEDVRRKAREFSEIMRKKGEEEIDEVVEELVQLCRNRNAYK

SEQ ID NO: 662 - protein, 440 aa, Artificial Sequence
  engineered beta-1,2-glycosyltransferase encoded in plasmid pA29695
STLRVLMFPWLALGHVNPYLRVAKKLADRGFHIYLCSTPINLNSIKKRIPEKYSDSIELVELHLPPLPELPPHYHTTNGLPPHLNGTLKKAFKMSAPNFSKILQTLKPDLLIYDFLQPWAPKVALSQNIPAVQFLTSGAALFSYFFHFVKKPGVEFPFPAIRLSKREQDKMREMFGTEPTEEDFLAEGSTKIILMCTSREIEGKYIDYLSELSNKKVVPVGPPFQEPLTEDDDDSELIDWLGKKDENSTVYVSFGSEYFLSKEDMEEIAYGLELSNVNFIWVARFPKGEEVNLEDALPKGFLERIGERGRVLDHLVPQAHILNHPSTGGFVSHCGWNSVMESIDFGVPIIAMPMQWDQPINARLMVELGVAVEIVRDENGKIHREEIAQVIKKVITEKTGENLRKKVREISENLKSKREEEMDAVVEELIQLCKNRNAYK

SEQ ID NO: 663 - protein, 440 aa, Artificial Sequence
  engineered beta-1,2-glycosyltransferase encoded in plasmid pA29696
STIKVLMLPWLALGHVNPFLRLAKKLSKRNFHIYLCSTPINLSSIKKRIPEKYSLSIELVELHLPSLPELPPHYHTTNGLPPHLNGTLKKAFEMSAPNFSNILKTLKPDLVIYDFLQPWAPKVALSQNIPAVQFLTSGATLFSYFLHFFKNPGVEFPFPAIRLSEREIDKMREMFGTEPTDDDFLVKRSCNIILICTFRELEGKYIDYLSTLTEKKIVPVGPPFQDPLDEDEDHTELIQWLDKKEESSTVYVSFGSEYFLSKEEMEEIAHGLELSKVNFIWVARFPVGEKIRVEEVLPEGFLERVGERGMVLDHLVPQAHILEHSSTGGFVSHCGWNSVMESMKFGVPIIAMPMQWDQPINARLVEEVGVGVEVKRDENGRLDREEIAKVIRKVVVEKSGEGVRKKARELSEKMRMKGEEEIDEVVEELVQLCKNRNAYK

SEQ ID NO: 664 - protein, 440 aa, Artificial Sequence
  engineered beta-1,2-glycosyltransferase encoded in plasmid pA29697
STIRVLMLPWLALGHVNPFLRLAKKLTKRNFHIYLCSTPINLSSIKKRIPEKYSLSIQLVELHLPSLPELPPHYHTTNGLPPHLNGTLKKAFDMAAPNFSNILKTLKPDLLIYDFLQPWAPKLALSQNIPAVQFLTSGAALFSYFLHFFKNPGVEFPFPEIRLSDREIDKMRNMFGTEPTDADFLIERSSNIILICTFREIEGKYIDYLSDLVGKKIVPVGPPFQEPLDEDEDKKELIEWLDKKEKSSTVYVSFGSEYFLSKEEIEEIAHGLELSNVNFIWVARFPVGEKIKLEEALPEGFLERVGERGMVLDHLVPQAHILGHSSIGGFVSHCGWNSVMESMKFGVPIIAMPMQWDQPINARLVEEVGVGVEVMRDENGKLQREEIAKVIREVVVEKSGEGVRKKARELSEKIRMKGEEEIDEVVEELVQLCKNRNAYK

SEQ ID NO: 665 - protein, 440 aa, Artificial Sequence
  engineered beta-1,2-glycosyltransferase encoded in plasmid pA29698
STLRVLMFPWLALGHVNPYLRVAKKLADRGFHIYLCSTPINLNSIKKRIPEKYSDSIELVELHLPSLPELPPHYHTTNGLPPHLNGTLKKAFKMSAPNFSKILQTLKPDLLIYDFLQPWAPKVALSQNIPAVQFLTSGAALFSYFFHFVKKPGVEFPFPAIRLSKREQDKMREMFGTEPTEEDFLAEGSTKIMLMCTSREIEGKYIDYLSELSNKKVVPVGPPFQEPLTEDDDDSELIDWLGKKDENSTVYVSFGSEYFLSKEDMEEIAYGLELSNVNFIWVARFPKGEEVNLEDALPKGFLERIGERGRVLDHLVPQAHILNHPSTGGFVSHCGWNSVMESIDFGVPIIAMPMQWDQPINARLMVELGVAVEIVRDENGKIHREEIAQVIKKVITEKTGENLRKKVREISENLKSKREEEMDAVVEELIQLCKNRNAYK

SEQ ID NO: 666 - protein, 440 aa, Artificial Sequence
  engineered beta-1,2-glycosyltransferase encoded in plasmid pA29699
TTIRVLMLPWLALGHVNPFLRLAKKLTKRNFHIYLCSTPINLSSIKKRLPEKYSLSIELVELHLPSLPELPPHYHTTNGLPPHLNGTLKKAFEMSAPNFSNILKTLKPDLVIYDFLQPWAPKVALSQNIPAVQFLTSGAALFSYFLHFLKNPGVEFPFPEIRLSDREIDKMRNMFGTEPTDEDFLIERSCDIILICTFREIEGKYIDYLSELTKKKIVPVGPPFQDPLDEDDDDTELMEWLDKKEESSTVYVSFGSEYFLSKEEIEEVAYGLELSKVNFIWVARFPKGEKINLEEALPKGFLERVGERGMVLDHLVPQAHILKHSSIGGFVSHCGWNSVMESMKFGVPIIAMPMQWDQPINARLVEEVGVGVEVKRDENGKLQREEIAKVIRKVVVEKSGEDVRKKARELSEKIREKGDEEIDGVVEELVQLCKNRNAYK

SEQ ID NO: 667 - protein, 440 aa, Artificial Sequence
  engineered beta-1,2-glycosyltransferase encoded in plasmid pA29700
SSISVLMLPWLALGHVNPFLRLAKKLSKRNFHIYLCSTPINLSSIKKRIPEKYSSSIELVELHLPSLPELPPHYHTTNGLPPHLNGTLKKAFDMAAPNFSNILKTLKPDLVIYDFLQPWAPKIALSQNIPAVQFLTSGATLFSYFLHFFKNPGSEFPFPAIRLSEREIDKMRNMFGTEPTDKDFLLKRSCNIILICTFREIEGKYIDYLSVLTEKKVVPVGPPFQDPLDEDDDHSELIQWLDKKEESSTVYVSFGSEYFLSKEEMEEIAHGLELSKVNFIWVARFPVGEKIRVEEALPEGFLERVGERGMVLDHLVPQAHILQHSSTGGFVSHCGWNSVMESLKFGVPIIAMPMQWDQPINARLVEEVGVGVEVKRDENGRLQREEIAKVIKEVVVEKNGEDVRKKARELSEKIRMKGDEEIDEVVEELVQLCKNRNAYK

SEQ ID NO: 668 - protein, 440 aa, Artificial Sequence
  engineered beta-1,2-glycosyltransferase encoded in plasmid pA29701
RSIKVLMFPWLALGHVNPFLRLAKKLTKRNFYIYFCSTPINLNSIKKRLPEKYSLSIQLVELHLPSLPELPPHYHTTNGLPPHLNGTLKKAFDMAAPNFSNILKTLKPDLLIYDFLQPWAPKLALSQNIPAVQFLTSGAALFSYFFHFLKNPGEEFPFPEIRLSDREIDKMREMFGTEPTDRDFLLEQSSNIILICTFREIEAKYIDYLSVLVNKKIVPVGPPFQEPLDEDDDETELIEWLDKKDESSTVYVSFGSEYFLSKEEIEEIAYGLELSNVNFIWVARFPVGEKTRVEEALPEGFLERVGERGMVLDHLVPQAHILGHSSIGGFVSHCGWNSVMESIKFGVPIIAMPMQWDQPINARLVEEVGVGVEVKRDENGRLEREEIAKVIKEVVVEKNGEDVRRKARELSENIRKKGEEEIDGVVEELVQLCKNRNAYK

SEQ ID NO: 669 - protein, 440 aa, Artificial Sequence; identical to SEQ ID NO: 665
  engineered beta-1,2-glycosyltransferase encoded in plasmid pA29702

SEQ ID NO: 670 - protein, 440 aa, Artificial Sequence
  engineered beta-1,2-glycosyltransferase encoded in plasmid pA29703
SKLSVLMFPWLALGHVNPFLRLAKKLSKRNFHIYFCSTPINLSSIKKRIPEKYSLSIQLVELHLPSLPELPPHYHTTNGLPPHLNGTLKKAFDMAAPNFSNILKTLKPDLLIYDFLQPWAPKIALSHNIPAVQFLTSGATLFSYFLHFFKKPGVEFPFPAIRLSDREKDKMRNMFGTEPTDEDFLFERSCNIILICSFREIEGKYIDYLSVLTKKKIVPVGPPFQDPLDEDEDDTELIEWLDKKDESSTVYVSFGSEYFLSKEEMEEIAHGLELSNVNFIWVARFPKGEKIRLEEALPEGFLERVGERGMVLDHLVPQAHILGHSSIGGFVSHCGWNSVMESMKFGVPIIAMPMQWDQPINARLVEEVGVGVEVKRDENGRLQREEIAKVIREVVVEKNGEDLRRKARELSEKIRKKGEEEIDEVVEELVQLCRNRNAYK

SEQ ID NO: 671 - protein, 440 aa, Artificial Sequence
  engineered beta-1,2-glycosyltransferase encoded in plasmid pA29704
NTISVLMLPWLALGHVNPFLRLAKKLTKRNFHIYLCSTPINLSSIKQRLPEKYSHSIELVELHLPSLPDLPPHYHTTNGLPPHLNGTLKKAFDMAAPNFSNILKTLKPDLVIYDFLQPWAPKVALSQNIPAVQFLTSGAALFSYFLHFLKNPGVEFPFPEIRLSDREIDKMREMFGTEPTDRDFLIEQSSNIILICTFREIEGKYIDYLSSLVGKKIVPVGPPFQDPLDEDDDDTELIEWLDKKEESSTVYVSFGSEYFLSKEEIEEVAYGLELSKVNFIWVARFPKGEKIELEEALPKGFLERVGERGMVLDHLVPQAHILGHSSIGGFVSHCGWNSVMESMKFGVPIIAMPMQWDQPINARLVEEVGVGVEVKRDENGKLQREEIAKVIREVVVEKSGEGVRKKARELSENMRKKGEEEIDEVVEELVQLCKNRNAYK

SEQ ID NO: 672 - protein, 440 aa, Artificial Sequence
  engineered beta-1,2-glycosyltransferase encoded in plasmid pA30015
QTLRVLMFPWLALGHVNPFLRIAKQLADRGFVIYLVSTAINLESIKKRIPEKYSNSIHLVELALPELPELPPHYHTTNGLPPHLNGTLHKALKMSAPNFSKILQNLKPDLVLYDFLQPWAEKVALEQGIPAVPLLTSGAALFSYFFNFLKRPGHEFPFPAIRLSKREQDKMREMFGTEPTEEDFLAPGNAGIMLMCTSRVIEAKYLDYCTELTNVKVVPVGPPFQDPLTEDIDDPELIDWLDTKPENSVIYISWGSEYFLSREDWEELWFGWELSNINMIVVLRFPKGEEQNLEDVLPKGWLERIGDRMRILDHLVPQAHILNHPSTGGFLSHCGWNSVMESIDFGVPIIAWPIQWDQPINARLLVELGVAIEIVRDEDGRIHRGELAQVWKDIVSGPTGEIIRAKVRDISKRLRARREEEMNAAAEELIQLCRNRNAYK

SEQ ID NO: 673 - protein, 440 aa, Artificial Sequence
  engineered beta-1,2-glycosyltransferase encoded in plasmid pA30016
QTLRVLMFPWLALGHVNPFLRIAKQLADRGFVIYLVSTAINLESIKKRIPEKYSNSIHLVELALPELPELPPHYHTTNGLPPHLNGTLHKALKMSAPNFSKILQNLKPDLVLYDFLQPWAEKVALEQGIPAVPLLTSGAALFSYFFNFLKRPGHEFPFPAIRLSKREQDKMREMFGTEPTEEDFLAPGNAGIMLMCTSRVIEAKYLDYCTELTNVKVVPVGPPFQDPLTEDIDDPELIDWLDTKPENSVLYISWGSEYFLSREDWEEIWFGIELSNINMIIVVRFPKGEEQNLEDVLPKGLLERLGDRVRWLDHLVPQAHILNHPSTGGFLSHCGWNSVMESIDFGVPIIAWPIQWDQPINARLLVELGVAIEIVRDEDGRIHRGEIAQVWKDIVSGPTGEIIRAKVRDISKRLRARREEEMNAAAEELIQLCRNRNAYK

SEQ ID NO: 674 - protein, 440 aa, Artificial Sequence
  engineered beta-1,2-glycosyltransferase encoded in plasmid pA30017
QTLRVLMFPWLALGHVNPFLRIAKQLADRGFVIYLVSTAINLESIKKRIPEKYSNSIHLVELALPELPELPPHYHTTNGLPPHLNGTLHKALKMSAPNFSKILQNLKPDLVLYDFLQPWAEKVALEQGIPAVPLLTSGAALFSYFFNFLKRPGHEFPFPAIRLSKREQDKMREMFGTEPTEEDFLAPGNAGIMLMCTSRVIEAKYLDYCTELTNVKVVPVGPPFQDPLTEDIDDPELIDWLDTKPENSVLYISFGSEYFLSREDLEELIFGMELSNLNMIWVLRFPKGEEQNLEDVLPKGFLERLGDRVRILDHLVPQAHILNHPSTGGFLSHCGWNSVMESIDFGVPIIAWPFQWDQPINARLLVELGVAIEIVRDEDGRIHRGELAQVWKDIMSGPTGEIIRAKVRDISKRLRARREEEMNAAAEELIQLCRNRNAYK

SEQ ID NO: 675 - protein, 440 aa, Artificial Sequence
  engineered beta-1,2-glycosyltransferase encoded in plasmid pA30018
QTLRVLMFPWLALGHVNPFLRIAKQLADRGFVIYLVSTAINLESIKKRIPEKYSNSIHLVELALPELPELPPHYHTTNGLPPHLNGTLHKALKMSAPNFSKILQNLKPDLVLYDFLQPWAEKVALEQGIPAVPLLTSGAALFSYFFNFLKRPGHEFPFPAIRLSKREQDKMREMFGTEPTEEDFLAPGNAGIMLMCTSRVIEAKYLDYCTELTNVKVVPVGPPFQDPLTEDIDDPELIDWLDTKPENSVVYVSWGSEYFLSREDLEEWLFGWELSNINMIVVLRFPKGEEQNLEDVLPKGFLERIGDRMRILDHLVPQAHILNHPSTGGFISHCGWNSVMESIDFGVPIIALPMQWDQPINARLLVELGVAIEIVRDEDGRLHRGEIAQVLKDIISGPTGEIIRAKVRDISKRLRARREEEMNAAAEELIQLCRNRNAYK

SEQ ID NO: 676 - protein, 440 aa, Artificial Sequence
  engineered beta-1,2-glycosyltransferase encoded in plasmid pA30019
QTLRVLMFPWLALGHVNPFLRIAKQLADRGFVIYLVSTAINLESIKKRIPEKYSNSIHLVELALPELPELPPHYHTTNGLPPHLNGTLHKALKMSAPNFSKILQNLKPDLVLYDFLQPWAEKVALEQGIPAVPLLTSGAALFSYFFNFLKRPGHEFPFPAIRLSKREQDKMREMFGTEPTEEDFLAPGNAGIMLMCTSRVIEAKYLDYCTELTNVKVVPVGPPFQDPLTEDIDDPELIDWLDTKPENSVVYVSFGSEYFLSREDLEELAFGLELSNINAIIVVRFPKGEEQNAEDVLPKGTLERGGDRARWLDHLVPQAHILNHPSTGGFISHCGWNSVMESIDFGVPIIAMPMQWDQPINARLLVELGVAVEIVRDEDGRIHRGEIAQVLKDVVSGPTGEILRAKVRDISKRLRARREEEMNAAAEELIQLCRNRNAYK

SEQ ID NO: 677 - protein, 440 aa, Artificial Sequence
  engineered beta-1,2-glycosyltransferase encoded in plasmid pA30020
QTLRVLMFPWLALGHVNPFLRIAKQLADRGFVIYLVSTAINLESIKKRIPEKYSNSIHLVELALPELPELPPHYHTTNGLPPHLNGTLHKALKMSAPNFSKILQNLKPDLVLYDFLQPWAEKVALEQGIPAVPLLTSGAALFSYFFNFLKRPGHEFPFPAIRLSKREQDKMREMFGTEPTEEDFLAPGNAGIMLMCTSRVIEAKYLDYCTELTNVKVVPVGPPFQDPLTEDIDDPELIDWLDTKPENSVIYVSWGSEYFLSREDWEEWWFGWELSNINMIVVLRFPKGEEQNLEDVLPKGFLERVGDRMRILDHLVPQAHILNHPSTGGFISHCGWNSVMESIDFGVPIIALPIQWDQPINARLLVELGVAIEIVRDEDGRLHRGEIAQVLKDIISGPTGEILRAKVRDISKRLRARREEEMNAAAEELIQLCRNRNAYK

SEQ ID NO: 678 - protein, 440 aa, Artificial Sequence
  engineered beta-1,2-glycosyltransferase encoded in plasmid pA30021
QTLRVLMFPWLALGHVNPFLRIAKQLADRGFVIYLVSTAINLESIKKRIPEKYSNSIHLVELALPELPELPPHYHTTNGLPPHLNGTLHKALKMSAPNFSKILQNLKPDLVLYDFLQPWAEKVALEQGIPAVPLLTSGAALFSYFFNFLKRPGHEFPFPAIRLSKREQDKMREMFGTEPTEEDFLAPGNAGIMLMCTSRVIEAKYLDYCTELTNVKVVPVGPPFQDPLTEDIDDPEIMDWLDTKPENSIVLVSFGSEYFLSREDMEEVAFGLELSNVNFLWLARFPKGEEQNLEDVLPKGFLERVGDRGRVVDHLIPQAHILNHPSVGGWISHCGWNSVMESIDFGVPIIAMPMQWDQPINARLLVELGVAVEIVRDEDGRIHRGEIAQVLKDVISGPTGEILRAKVRDISKRLRARREEEMNAAAEELIQLCRNRNAYK

SEQ ID NO: 679 - protein, 440 aa, Artificial Sequence
  engineered beta-1,2-glycosyltransferase encoded in plasmid pA30022
QTLRVLMFPWLALGHVNPFLRIAKQLADRGFVIYLVSTAINLESIKKRIPEKYSNSIHLVELALPELPELPPHYHTTNGLPPHLNGTLHKALKMSAPNFSKILQNLKPDLVLYDFLQPWAEKVALEQGIPAVPLLTSGAALFSYFFNFLKRPGHEFPFPAIRLSKREQDKMREMFGTEPTEEDFLAPGNAGIMLMCTSRVIEAKYLDYCTELTNVKVVPVGPPFQDPLTEDIDDPEVLDWLDTKPENSIVLVSFGSEYFLSREDMEEVAFGLELSNVNFLWVARFPKGEEQNLEDVLPKGFLERVGDRGRVWDHLVPQAHLLNHPSIGGVISHCGWNSVMESIDFGIPIIAMPMQWDQPINARLLVELGVAVEIVRDEDGRIHRGEIAQVLKDVISGPTGEILRAKVRDISKRLRARREEEMNAAAEELIQLCRNRNAYK

SEQ ID NO: 680 - protein, 440 aa, Artificial Sequence
  engineered beta-1,2-glycosyltransferase encoded in plasmid pA30023
QTLRVLMFPWLALGHVNPFLRIAKQLADRGFVIYLVSTAINLESIKKRIPEKYSNSIHLVELALPELPELPPHYHTTNGLPPHLNGTLHKALKMSAPNFSKILQNLKPDLVLYDFLQPWAEKVALEQGIPAVPLLTSGAALFSYFFNFLKRPGHEFPFPAIRLSKREQDKMREMFGTEPTEEDFLAPGNAGIMLMCTSRVIEAKYLDYCTELTNVKVVPVGPPFQDPLTEDIDDPELIDWLDTKPENSIVFVSFGSEYFLSREDMEEVAFGLELSNVNFVWLARFPKGEEQNLEDVLPKGFLERVGDRGRVIDHLIPQAHLLNHPSLGGWISHCGWNSVMESIDFGVPIIAMPMQWDQPINARLLVELGVAVEIVRDEDGRIHRGEIAQVLKDVISGPTGEILRAKVRDISKRLRARREEEMNAAAEELIQLCRNRNAYK

SEQ ID NO: 681 - protein, 440 aa, Artificial Sequence
  engineered beta-1,2-glycosyltransferase encoded in plasmid pA30024
QTLRVLMFPWLALGHVNPFLRIAKQLADRGFVIYLVSTAINLESIKKRIPEKYSNSIHLVELALPELPELPPHYHTTNGLPPHLNGTLHKALKMSAPNFSKILQNLKPDLVLYDFLQPWAEKVALEQGIPAVPLLTSGAALFSYFFNFLKRPGHEFPFPAIRLSKREQDKMREMFGTEPTEEDFLAPGNAGIMLMCTSRVIEAKYLDYCTELTNVKVVPVGPPFQDPLTEDIDDPELIDWLDTKPENSVVFVSFGSEYFLSREDMEEVAFGLELSNVNFVWLARFPKGEEQNLEDVLPKGFLERVGDRGRVIDHLMPQAHLLNHPSVGGWISHCGWNSVMESIDFGIPIIAMPMQWDQPINARLLVELGVAVEIVRDEDGRIHRGEIAQVLKDVISGPTGEILRAKVRDISKRLRARREEEMNAAAEELIQLCRNRNAYK

SEQ ID NO: 682 - protein, 440 aa, Artificial Sequence
  engineered beta-1,2-glycosyltransferase encoded in plasmid pA30025
QTLRVLMFPWLALGHVNPFLRIAKQLADRGFVIYLVSTAINLESIKKRIPEKYSNSIHLVELALPELPELPPHYHTTNGLPPHLNGTLHKALKMSAPNFSKILQNLKPDLVLYDFLQPWAEKVALEQGIPAVPLLTSGAALFSYFFNFLKRPGHEFPFPAIRLSKREQDKMREMFGTEPTEEDFLAPGNAGIMLMCTSRVIEAKYLDYCTELTNVKVVPVGPPFQDPLTEDIDDPEILDWLDTKPENSIVVVSFGSEYFLSREDMEEVAFGLELSNVNFIWIARFPKGEEQNLEDVLPKGFLERVGDRGRVLDHLIPQAHILNHPSIGGWISHCGWNSVMESIDFGVPIIAMPMQWDQPINARLLVELGVAVEIVRDEDGRIHRGEIAQVLKDVISGPTGEILRAKVRDISKRLRARREEEMNAAAEELIQLCRNRNAYK

SEQ ID NO: 683 - protein, 440 aa, Artificial Sequence
  engineered beta-1,2-glycosyltransferase encoded in plasmid pA30026
QTLRVLMFPWLALGHVNPFLRIAKQLADRGFVIYLVSTAINLESIKKRIPEKYSNSIHLVELALPELPELPPHYHTTNGLPPHLNGTLHKALKMSAPNFSKILQNLKPDLVLYDFLQPWAEKVALEQGIPAVPLLTSGAALFSYFFNFLKRPGHEFPFPAIRLSKREQDKMREMFGTEPTEEDFLAPGNAGIMLMCTSRVIEAKYLDYCTELTNVKVVPVGPPFQDPLTEDIDDPELIDWLDTKPENSIVVVSFGSEYFLSREDMEEVAFGLELSNVNFIWLARFPKGEEQNLEDVLPKGFLERVGDRGRVIDHLWPQAHILNHPSIGGWISHCGWNSVMESIDFGVPIIAMPMQWDQPINARLLVELGVAVEIVRDEDGRIHRGEIAQVLKDVISGPTGEILRAKVRDISKRLRARREEEMNAAAEELIQLCRNRNAYK

SEQ ID NO: 684 - protein, 440 aa, Artificial Sequence
  engineered beta-1,2-glycosyltransferase encoded in plasmid pA30027
QTLRVLMFPWLALGHVNPFLRIAKQLADRGFVIYLVSTAINLESIKKRIPEKYSNSIHLVELALPELPELPPHYHTTNGLPPHLNGTLHKALKMSAPNFSKILQNLKPDLVLYDFLQPWAEKVALEQGIPAVPLLTSGAALFSYFFNFLKRPGHEFPFPAIRLSKREQDKMREMFGTEPTEEDFLAPGNAGIMLMCTSRVLEAKYLDYCTELTNVKVVPVGPPFQDPLTEDIDDPELIDWLDTKPENSVVYVSFGSEYFLSREDMEEVAFGLELSNVNFIWVARFPKGEEQNLEDVLPKGFLERVGDRGRVLDHLVPQAHILNHPSTGGFISHCGWNSILESLDFGVPIIAMPMQWDQPINARLIVEWGIAVEIVRDEDGRIHRGEIAQVLKDVISGPTGEILRAKVRDLSKRWRARREEEMNAAAEELIQLCRNRNAYK

SEQ ID NO: 685 - protein, 440 aa, Artificial Sequence
  engineered beta-1,2-glycosyltransferase encoded in plasmid pA30028
QTLRVLMFPWLALGHVNPFLRIAKQLADRGFVIYLVSTAINLESIKKRIPEKYSNSIHLVELALPELPELPPHYHTTNGLPPHLNGTLHKALKMSAPNFSKILQNLKPDLVLYDFLQPWAEKVALEQGIPAVPLLTSGAALFSYFFNFLKRPGHEFPFPAIRLSKREQDKMREMFGTEPTEEDFLAPGNAGIMLMCTSRVLEAKYLDYCTELTNVKVVPVGPPFQDPLTEDIDDPELIDWLDTKPENSVVYVSFGSEYFLSREDMEEVAFGLELSNVNFIWVARFPKGEEQNLEDVLPKGFLERVGDRGRVLDHLVPQAHILNHPSTGGFISHCGWNSWLESLDFGVPIIAMPMQWDQPINARLIVEMGIAVEIVRDEDGRIHRGEIAQVLKDVISGPTGEILRAKVRDISKRLRARREEEMNAAAEELIQLCRNRNAYK

SEQ ID NO: 686 - protein, 440 aa, Artificial Sequence
  engineered beta-1,2-glycosyltransferase encoded in plasmid pA30029
QTLRVLMFPWLALGHVNPFLRIAKQLADRGFVIYLVSTAINLESIKKRIPEKYSNSIHLVELALPELPELPPHYHTTNGLPPHLNGTLHKALKMSAPNFSKILQNLKPDLVLYDFLQPWAEKVALEQGIPAVPLLTSGAALFSYFFNFLKRPGHEFPFPAIRLSKREQDKMREMFGTEPTEEDFLAPGNAGIMLMCTSRVIEAKYLDYCTELTNVKVVPVGPPFQDPLTEDIDDPELIDWLDTKPENSVVYVSFGSEYFLSREDMEEVAFGLELSNVNFIWVARFPKGEEQNLEDVLPKGFLERVGDRGRVLDHLVPQAHILNHPSTGGFISHCGTNSIWESLDFGVPIIAMPMQWDQPINARLLVELGVAVEIVRDEDGRIHRGEIAQVLKDVISGPTGEILRAKVRDISKRLRARREEEMNAAAEELIQLCRNRNAYK

SEQ ID NO: 687 - protein, 440 aa, Artificial Sequence
  engineered beta-1,2-glycosyltransferase encoded in plasmid pA30030
QTLRVLMFPWLALGHVNPFLRIAKQLADRGFVIYLVSTAINLESIKKRIPEKYSNSIHLVELALPELPELPPHYHTTNGLPPHLNGTLHKALKMSAPNFSKILQNLKPDLVLYDFLQPWAEKVALEQGIPAVPLLTSGAALFSYFFNFLKRPGHEFPFPAIRLSKREQDKMREMFGTEPTEEDFLAPGNAGIMLMCTSRVIEAKYLDYCTELTNVKVVPVGPPFQDPLTEDIDDPELIDWLDTKPENSVVYVSFGSEYFLSREDMEEVAFGLELSNVNFIWVARFPKGEEQNLEDVLPKGFLERVGDRGRVLDHLVPQAHILNHPSTGGFISHCGWNSILESWDFGVPIIAMPMQWDQPINARLIVEWGWAVEIVRDEDGRIHRGEIAQVLKDVISGPTGEILRAKVRDLSKRLRARREEEMNAAAEELIQLCRNRNAYK

SEQ ID NO: 688 - protein, 440 aa, Artificial Sequence
  engineered beta-1,2-glycosyltransferase encoded in plasmid pA30031
QTLRVLMFPWLALGHVNPFLRIAKQLADRGFVIYLVSTAINLESIKKRIPEKYSNSIHLVELALPELPELPPHYHTTNGLPPHLNGTLHKALKMSAPNFSKILQNLKPDLVLYDFLQPWAEKVALEQGIPAVPLLTSGAALFSYFFNFLKRPGHEFPFPAIRLSKREQDKMREMFGTEPTEEDFLAPGNAGIMLMCTSRVLEAKYLDYCTELTNVKVVPVGPPFQDPLTEDIDDPELIDWLDTKPENSVVYVSFGSEYFLSREDMEEVAFGLELSNVNFIWVARFPKGEEQNLEDVLPKGFLERVGDRGRVLDHLVPQAHILNHPSTGGFISHCGWNSWLESLDFGVPVIAMPMQWDQPINARLIVEMGVAVEIVRDEDGRIHRGEIAQVLKDVISGPTGEILRAKVRDISKRLRARREEEMNAAAEELIQLCRNRNAYK

SEQ ID NO: 689 - protein, 440 aa, Artificial Sequence
  engineered beta-1,2-glycosyltransferase encoded in plasmid pA30032
QTLRVLMFPWLALGHVNPFLRIAKQLADRGFVIYLVSTAINLESIKKRIPEKYSNSIHLVELALPELPELPPHYHTTNGLPPHLNGTLHKALKMSAPNFSKILQNLKPDLVLYDFLQPWAEKVALEQGIPAVPLLTSGAALFSYFFNFLKRPGHEFPFPAIRLSKREQDKMREMFGTEPTEEDFLAPGNAGIMLMCTSRVIEAKYLDYCTELTNVKVVPVGPPFQDPLTEDIDDPELIDWLDTKPENSVVYVSFGSEYFLSREDMEEVAFGLELSNVNFIWVARFPKGEEQNLEDVLPKGFLERVGDRGRVLDHLVPQAHILNHPSTGGFISHCGWNSILESWDFGVPIIAMPMQWDQPINARLIVELGWAVEIVRDEDGRIHRGEIAQVLKDVISGPTGEILRAKVRDLSKRLRARREEEMNAAAEELIQLCRNRNAYK

SEQ ID NO: 690 - protein, 440 aa, Artificial Sequence
  engineered beta-1,2-glycosyltransferase encoded in plasmid pA30033
QTLRVIMLPWLALGHVNPFLRIAKQLADRGFVIYLLSTAINLESIKKRIPEKYSNSIHLVELALPELPEIPPHYHTTNGLPPHLNGTLHKALKMSAPNISKIWQNWKPDLLLWDFLQPWVEKIALEQGVPVVPLLTSGAALFSYFFNFLKRPGHEFPFPAIRLSKREQDKMREMFGTEPTEEDFLAPGNAGIMLMCTSRVIEAKYLDYCTELTNVKVVPVGPPFQDPLTEDIDDPELIDWLDTKPENSVVYVSFGSEYFLSREDMEEVAFGLELSNVNFIWVARFPKGEEQNLEDVLPKGFLERVGDRGRVLDHLVPQAHILNHPSTGGFISHCGWNSVMESIDFGVPIIAMPMQWDQPINARLLVELGVAVEIVRDEDGRIHRGEIAQVLKDVISGPTGEILRAKVRDISKRLRARREEEMNAAAEELIQLCRNRNAYK

SEQ ID NO: 691 - protein, 440 aa, Artificial Sequence
  engineered beta-1,2-glycosyltransferase encoded in plasmid pA30034
QTLRVVMFPWLALGHVNPFLRIAKQLADRGFVIYLLSTAINLESIKKRIPEKYSNSIHLVELALPELPELPPHYHTTNGLPPHLNGTLHKAVKMSAPNVSKLLQNWKPDLLLFDFLQPWLEKIALEQGIPVVPLLTSGAALFSYFFNFLKRPGHEFPFPAIRLSKREQDKMREMFGTEPTEEDFLAPGNAGIMLMCTSRVIEAKYLDYCTELTNVKVVPVGPPFQDPLTEDIDDPELIDWLDTKPENSVVYVSFGSEYFLSREDMEEVAFGLELSNVNFIWVARFPKGEEQNLEDVLPKGFLERVGDRGRVLDHLVPQAHILNHPSTGGFISHCGWNSVMESIDFGVPIIAMPMQWDQPINARLLVELGVAVEIVRDEDGRIHRGEIAQVLKDVISGPTGEILRAKVRDISKRLRARREEEMNAAAEELIQLCRNRNAYK

SEQ ID NO: 692 - protein, 440 aa, Artificial Sequence
  engineered beta-1,2-glycosyltransferase encoded in plasmid pA30035
QTLRVIMIPWLALGHVNPFLRIAKQLADRGFVIYLISTAINLESIKKRIPEKYSNSIHLVELALPELPELPPHYHTTNGLPPHLNGTLHKALKMSAPNLSKIWQNLKPDLLLWDFLQPWIEKIALEQGVPVVPLLTSGAALFSYFFNFLKRPGHEFPFPAIRLSKREQDKMREMFGTEPTEEDFLAPGNAGIMLMCTSRVIEAKYLDYCTELTNVKVVPVGPPFQDPLTEDIDDPELIDWLDTKPENSVVYVSFGSEYFLSREDMEEVAFGLELSNVNFIWVARFPKGEEQNLEDVLPKGFLERVGDRGRVLDHLVPQAHILNHPSTGGFISHCGWNSVMESIDFGVPIIAMPMQWDQPINARLLVELGVAVEIVRDEDGRIHRGEIAQVLKDVISGPTGEILRAKVRDISKRLRARREEEMNAAAEELIQLCRNRNAYK

SEQ ID NO: 693 - protein, 440 aa, Artificial Sequence
  engineered beta-1,2-glycosyltransferase encoded in plasmid pA30036
QTLRVLMLPWLALGHVNPFLRIAKQLADRGFVIYLLSTAINLESIKKRIPEKYSNSIHLVELALPELPELPPHYHTTNGLPPHLNGTLHKAVKMSAPNISKVLQNWKPDLILFDFLQPWLEKIALEQGIPVVPLLTSGAALFSYFFNFLKRPGHEFPFPAIRLSKREQDKMREMFGTEPTEEDFLAPGNAGIMLMCTSRVIEAKYLDYCTELTNVKVVPVGPPFQDPLTEDIDDPELIDWLDTKPENSVVYVSFGSEYFLSREDMEEVAFGLELSNVNFIWVARFPKGEEQNLEDVLPKGFLERVGDRGRVLDHLVPQAHILNHPSTGGFISHCGWNSVMESIDFGVPIIAMPMQWDQPINARLLVELGVAVEIVRDEDGRIHRGEIAQVLKDVISGPTGEILRAKVRDISKRLRARREEEMNAAAEELIQLCRNRNAYK

SEQ ID NO: 694 - protein, 440 aa, Artificial Sequence
  engineered beta-1,2-glycosyltransferase encoded in plasmid pA30037
QTLRVVMVPWLALGHVNPFLRIAKQLADRGFVIYLASTAINLESIKKRIPEKYSNSIHLVELALPELPELPPHYHTTNGLPPHLNGTLHKALKMSAPNLSKLLQNLKPDLILLDFLQPWAEKVALEQGIPSVPLLTSGAALFSYFFNFLKRPGHEFPFPAIRLSKREQDKMREMFGTEPTEEDFLAPGNAGIMLMCTSRVIEAKYLDYCTELTNVKVVPVGPPFQDPLTEDIDDPELIDWLDTKPENSVVYVSFGSEYFLSREDMEEVAFGLELSNVNFIWVARFPKGEEQNLEDVLPKGFLERVGDRGRVLDHLVPQAHILNHPSTGGFISHCGWNSVMESIDFGVPIIAMPMQWDQPINARLLVELGVAVEIVRDEDGRIHRGEIAQVLKDVISGPTGEILRAKVRDISKRLRARREEEMNAAAEELIQLCRNRNAYK

SEQ ID NO: 695 - protein, 440 aa, Artificial Sequence
  engineered beta-1,2-glycosyltransferase encoded in plasmid pA30038
QTLRVLMLPWLALGHVNPFLRIAKQLADRGFVIYLISTAINLESIKKRIPEKYSNSIHLVELALPELPEIPPHYHTTNGLPPHLNGTLHKALKMSAPNFSKILQNLKPDLILFDFLQPWLEKIALEQGIPVVPLLTSGAALFSYFFNFLKRPGHEFPFPAIRLSKREQDKMREMFGTEPTEEDFLAPGNAGIMLMCTSRVIEAKYLDYCTELTNVKVVPVGPPFQDPLTEDIDDPELIDWLDTKPENSVVYVSFGSEYFLSREDMEEVAFGLELSNVNFIWVARFPKGEEQNLEDVLPKGFLERVGDRGRVLDHLVPQAHILNHPSTGGFISHCGWNSVMESIDFGVPIIAMPMQWDQPINARLLVELGVAVEIVRDEDGRIHRGEIAQVLKDVISGPTGEILRAKVRDISKRLRARREEEMNAAAEELIQLCRNRNAYK

SEQ ID NO: 696 - protein, 440 aa, Artificial Sequence
  engineered beta-1,2-glycosyltransferase encoded in plasmid pA30039
QTLRILVFPWLALGHLNPILRWIKQLADRGWVVYIVSTAINLESIKKRIPEKYSNSIHLVELALPELPELPPHYHTTNGLPPHLNGTLHKALKMSAPNFSKILQNLKPDVVIYDFLQPWAEKVALEQGIPAIPLLTSGAALFSYFFNFLKRPGHEFPFPAIRLSKREQDKMREMFGTEPTEEDFLAPGNAGVMLMCTSRVIEAKYLDYCTELTNVKVIPIGPPFQDPLTEDIDDPELIDWLDTKPENSVVYVSFGSEYFLSREDMEEVAFGLELSNVNFIWVARFPKGEEQNLEDVLPKGFLERVGDRGRVLDHLVPQAHILNHPSTGGFISHCGWNSVMESIDFGVPIIAMPMQWDQPINARLLVELGVAVEIVRDEDGRIHRGEIAQVLKDVISGPTGEILRAKVRDISKRLRARREEELNAWLEEIIQWCRNRNAYK

SEQ ID NO: 697 - protein, 440 aa, Artificial Sequence
  engineered beta-1,2-glycosyltransferase encoded in plasmid pA30040
QTLRILIFPWLALGHINPLLRLIKQWADRGFVWYLVSTAINLESIKKRIPEKYSNSIHLVELALPEWPELPPHYHTTNGLPPHLNGTLHKALKMSAPNFSKILQNLKPDLVLYDFLQPWAEKVALEQGIPAIPILTSGAALFSYFFNFLKRPGHEFPFPAIRLSKREQDKMREMFGTEPTEEDFLAPGNAGVMLMCTSRVIEAKYLDYCTELTNVKVIPIGPPFQDPLTEDIDDPELIDWLDTKPENSVVYVSFGSEYFLSREDMEEVAFGLELSNVNFIWVARFPKGEEQNLEDVLPKGFLERVGDRGRVLDHLVPQAHILNHPSTGGFISHCGWNSVMESIDFGVPIIAMPMQWDQPINARLLVELGVAVEIVRDEDGRIHRGEIAQVLKDVISGPTGEILRAKVRDISKRLRARREEELNAWLEELIQWCRNRNAYK

SEQ ID NO: 698 - protein, 440 aa, Artificial Sequence
  engineered beta-1,2-glycosyltransferase encoded in plasmid pA30041
QTLRILWFPWLALGHINPILRIMKQWADRGIVLYMVSTAINLESIKKRIPEKYSNSIHLVELALPEYPELPPHYHTTNGLPPHLNGTLHKALKMSAPNFSKILQNLKPDLVWYDFLQPWAEKVALEQGIPAIPVLTSGAALFSYFFNFLKRPGHEFPFPAIRLSKREQDKMREMFGTEPTEEDFLAPGNAGIMLMCTSRVIEAKYLDYCTELTNVKVIPVGPPFQDPLTEDIDDPELIDWLDTKPENSVVYVSFGSEYFLSREDMEEVAFGLELSNVNFIWVARFPKGEEQNLEDVLPKGFLERVGDRGRVLDHLVPQAHILNHPSTGGFISHCGWNSVMESIDFGVPIIAMPMQWDQPINARLLVELGVAVEIVRDEDGRIHRGEIAQVLKDVISGPTGEILRAKVRDISKRLRARREEEWNAILEELIQLCRNRNAYK

SEQ ID NO: 699 - protein, 440 aa, Artificial Sequence
  engineered beta-1,2-glycosyltransferase encoded in plasmid pA30042
QTLRVLVFPWLALGHINPILRWIKQFADRGIVWYLVSTAINLESIKKRIPEKYSNSIHLVELALPEWPELPPHYHTTNGLPPHLNGTLHKALKMSAPNFSKILQNLKPDLVLYDFLQPWAEKVALEQGIPAIPLLTSGAALFSYFFNFLKRPGHEFPFPAIRLSKREQDKMREMFGTEPTEEDFLAPGNAGVMLMCTSRVIEAKYLDYCTELTNVKVIPIGPPFQDPLTEDIDDPELIDWLDTKPENSVVYVSFGSEYFLSREDMEEVAFGLELSNVNFIWVARFPKGEEQNLEDVLPKGFLERVGDRGRVLDHLVPQAHILNHPSTGGFISHCGWNSVMESIDFGVPIIAMPMQWDQPINARLLVELGVAVEIVRDEDGRIHRGEIAQVLKDVISGPTGEILRAKVRDISKRLRARREEELNAILEEWIQLCRNRNAYK

SEQ ID NO: 700 - protein, 440 aa, Artificial Sequence
  engineered beta-1,2-glycosyltransferase encoded in plasmid pA30044
QTLRVLAFPWLALGHLNPLLRFIKQMADRGFVVYVVSTAINLESIKKRIPEKYSNSQHLVELALPETPELPPHYHTTNGLPPHLNGTLHKALKMSAPNFSKILQNLKPDLVLYDFLQPWAEKVALEQGIPAIPLLTSGAALFSYFFNFLKRPGHEFPFPAIRLSKREQDKMREMFGTEPTEEDFLAPGNAGTMTMCTSRVIEAKYLDYCTELTNVKVSPTGPPFQDPLTEDIDDPELIDWLDTKPENSVVYVSFGSEYFLSREDMEEVAFGLELSNVNFIWVARFPKGEEQNLEDVLPKGFLERVGDRGRVLDHLVPQAHILNHPSTGGFISHCGWNSVMESIDFGVPIIAMPMQWDQPINARLLVELGVAVEIVRDEDGRIHRGEIAQVLKDVISGPTGEILRAKVRDISKRLRARREEEINALMEELIQLCRNRNAYK

SEQ ID NO: 701 - protein, 440 aa, Artificial Sequence
  engineered beta-1,2-glycosyltransferase encoded in plasmid pA30045
QTLRVLMFPWLALGHVNPFLRIAKQLADRGFVIYLVSTAINLESIKKRIPEKYSNSIHLVELALPELPELPPHYHTTNGLPPHLNGTLHKALKMSAPNFSKILQNLKPDLVLYDLWQPWAEKVALEQGIPAVPLITSGLALWSYIVNFLKRPGHEFPFPAIRLSKREQDKMRELFGTEPTEEDFLAPGNAGIILICTSRVIEAKYIDYLTEWTNIKIVPVGPPFQDPLTEDIDDPELIDWLDTKPENSVVYVSFGSEYFLSREDMEEVAFGLELSNVNFIWVARFPKGEEQNLEDVLPKGFLERVGDRGRVLDHLVPQAHILNHPSTGGFISHCGWNSVMESIDFGVPIIAMPMQWDQPINARLLVELGVAVEIVRDEDGRIHRGEIAQVLKDVISGPTGEILRAKVRDISKRLRARREEEMNAAAEELIQLCRNRNAYK

SEQ ID NO: 702 - protein, 440 aa, Artificial Sequence
  engineered beta-1,2-glycosyltransferase encoded in plasmid pA30046
QTLRVLMFPWLALGHVNPFLRIAKQLADRGFVIYLVSTAINLESIKKRIPEKYSNSIHLVELALPELPELPPHYHTTNGLPPHLNGTLHKALKMSAPNFSKILQNLKPDLVLYDVWQPWAEKVALEQGIPAVPLVTSGLALWSYWVNFLKRPGHEFPFPAIRLSKREQDKMRELFGTEPTEEDFLAPGNAGIILICTSRVIEAKYIDYLTELTNIKIVPVGPPFQDPLTEDIDDPELIDWLDTKPENSVVYVSFGSEYFLSREDMEEVAFGLELSNVNFIWVARFPKGEEQNLEDVLPKGFLERVGDRGRVLDHLVPQAHILNHPSTGGFISHCGWNSVMESIDFGVPIIAMPMQWDQPINARLLVELGVAVEIVRDEDGRIHRGEIAQVLKDVISGPTGEILRAKVRDISKRLRARREEEMNAAAEELIQLCRNRNAYK

SEQ ID NO: 703 - protein, 440 aa, Artificial Sequence
  engineered beta-1,2-glycosyltransferase encoded in plasmid pA30047
QTLRVLMFPWLALGHVNPFLRIAKQLADRGFVIYLVSTAINLESIKKRIPEKYSNSIHLVELALPELPELPPHYHTTNGLPPHLNGTLHKALKMSAPNFSKILQNLKPDLVLYDILQPWAEKVALEQGIPAVPLWTSGLALLSYLMNFLKRPGHEFPFPAIRLSKREQDKMREMFGTEPTEEDFLAPGNAGILLICTSRVIEAKYMDYLTEWTNIKIVPVGPPFQDPLTEDIDDPELIDWLDTKPENSVVYVSFGSEYFLSREDMEEVAFGLELSNVNFIWVARFPKGEEQNLEDVLPKGFLERVGDRGRVLDHLVPQAHILNHPSTGGFISHCGWNSVMESIDFGVPIIAMPMQWDQPINARLLVELGVAVEIVRDEDGRIHRGEIAQVLKDVISGPTGEILRAKVRDISKRLRARREEEMNAAAEELIQLCRNRNAYK

SEQ ID NO: 704 - protein, 440 aa, Artificial Sequence
  engineered beta-1,2-glycosyltransferase encoded in plasmid pA30048
QTLRVLMFPWLALGHVNPFLRIAKQLADRGFVIYLVSTAINLESIKKRIPEKYSNSIHLVELALPELPELPPHYHTTNGLPPHLNGTLHKALKMSAPNFSKILQNLKPDLVLYDMLQPWAEKVALEQGIPAVPLLTSGLALLSYIWNFLKRPGHEFPFPAIRLSKREQDKMRELFGTEPTEEDFLAPGNAGIILVCTSRVIEAKYIDYLTELTNLKIVPVGPPFQDPLTEDIDDPELIDWLDTKPENSVVYVSFGSEYFLSREDMEEVAFGLELSNVNFIWVARFPKGEEQNLEDVLPKGFLERVGDRGRVLDHLVPQAHILNHPSTGGFISHCGWNSVMESIDFGVPIIAMPMQWDQPINARLLVELGVAVEIVRDEDGRIHRGEIAQVLKDVISGPTGEILRAKVRDISKRLRARREEEMNAAAEELIQLCRNRNAYK

SEQ ID NO: 705 - protein, 440 aa, Artificial Sequence
  engineered beta-1,2-glycosyltransferase encoded in plasmid pA30049
QTLRVLMFPWLALGHVNPFLRIAKQLADRGFVIYLVSTAINLESIKKRIPEKYSNSIHLVELALPELPELPPHYHTTNGLPPHLNGTLHKALKMSAPNFSKILQNLKPDLVLYDWLQPWAEKVALEQGIPAVPLVTSGAALVSYWVNFLKRPGHEFPFPAIRLSKREQDKMRELFGTEPTEEDFLAPGNAGIILVCTSRVIEAKYLDYWTELTNVKWVPVGPPFQDPLTEDIDDPELIDWLDTKPENSVVYVSFGSEYFLSREDMEEVAFGLELSNVNFIWVARFPKGEEQNLEDVLPKGFLERVGDRGRVLDHLVPQAHILNHPSTGGFISHCGWNSVMESIDFGVPIIAMPMQWDQPINARLLVELGVAVEIVRDEDGRIHRGEIAQVLKDVISGPTGEILRAKVRDISKRLRARREEEMNAAAEELIQLCRNRNAYK

SEQ ID NO: 706 - protein, 440 aa, Artificial Sequence
  engineered beta-1,2-glycosyltransferase encoded in plasmid pA30050
QTLRVLMFPWLALGHVNPFLRIAKQLADRGFVIYLVSTAINLESIKKRIPEKYSNSIHLVELALPELPELPPHYHTTNGLPPHLNGTLHKALKMSAPNFSKILQNLKPDLVLYDLLQPWAEKVALEQGIPAVPLLTSGVALWSYILNFLKRPGHEFPFPAIRLSKREQDKMRELFGTEPTEEDFLAPGNAGIVLICTSRVIEAKYLDYLTELTNVKVVPVGPPFQDPLTEDIDDPELIDWLDTKPENSVVYVSFGSEYFLSREDMEEVAFGLELSNVNFIWVARFPKGEEQNLEDVLPKGFLERVGDRGRVLDHLVPQAHILNHPSTGGFISHCGWNSVMESIDFGVPIIAMPMQWDQPINARLLVELGVAVEIVRDEDGRIHRGEIAQVLKDVISGPTGEILRAKVRDISKRLRARREEEMNAAAEELIQLCRNRNAYK

SEQ ID NO: 707 - protein, 440 aa, Artificial Sequence
  engineered beta-1,2-glycosyltransferase encoded in plasmid pA32939
QTLRVLMFPWLALGHVNPFLRIAKQLADRGFVIHLVSTAVVLESAKKRIPEKYSNSIHLVELALPLLPELPSHYHTTNGLPPHLNGTLHKALQMSAPEFSKILQNLKPDLVLYDFLQPWAEKVALEQGIPAVPLLTSGAALFAYFFNFLKRPGHEFPFEAIRLSKREQDKMREMFGTEPTELDFLAPGNAGIMLMCTSRVIEAKYLDYCQKLTNVKVVPVGPPFQDPLTEDISDPELIRWLDTKPPNSVVYVSFGSEYFLSREDMEEVAFGLELSNVNFIWVARFPKGVEQNLEDVLPPGFLERVGDRGRVLDHLVPQAHILNHKSTGGFISHCGWNSVMESIDFGVPIIAMPMQWDQPINARLLVELGVAVEIVRQEDGRIHRGAIAQVLKDVISGPTGEKLRANVRDIAKRLRARREVEMTIAALELIRLGRNRNAYK

SEQ ID NO: 708 - protein, 440 aa, Artificial Sequence
  engineered beta-1,2-glycosyltransferase encoded in plasmid pA32940
QTLRVLMFPWLALGHVNPFLRIAKQLADRGFVIHLVSTAVVLESAKKRIPEKYSNSIHLVELALPLLPELPPHYHTTNGLPPHLNGTLHKALQMSAPEFSKILQNLKPDLVLYDFLQPWAEKVALEQGIPAVPLLTSGAALFAYFFNFLKRPGHEFPFPAIRLSKREQDKMREMFGTEPTELDFLAPGNAGIMLMCTSRVIEAKYLDYCQKLTNVKVVPVGPPFQDPLTEDISDPELIRWLDTKPENSVVYVSFGSEYFLSREDMEEVAFGLELSNVNFIWVARFPKGVEQNLEDVLPKGFLERVGDRGRVLDHLVPQAHILNHPSTGGFISHCGWNSVMESIDFGVPIIAMPMQWDQPINARLLVELGVAVEIVRQEDGRIHRGAIAQVLKDVISGPTGEKLRANVRDIAKRLRARREVEMTIAALELIRLCRNRNAYK

SEQ ID NO: 709 - protein, 440 aa, Artificial Sequence
  engineered beta-1,2-glycosyltransferase encoded in plasmid pA32941
QTLRVLMFPWLALGHVNPFLRIAKQLADRGFVIHLVSTAVNLESAKKRIPEKYSNSIHLVELALPELPELPPHYHTTNGLPPHLNGTLHKALQMSAPEFSKILQNLKPDLVLYDFLQPWAEKVALEQGIPAVPLLTSGAALFAYFFNFLKRPGHEFPFPAIRLSKREQDKMREMFGTEPTEEDFLAPGNAGIMLMCTSRVIEAKYLDYCQKLTNVKVVPVGPPFQDPLTEDISDPELIRWLDTKPENSVVYVSFGSEYFLSREDMEEVAFGLELSNVNFIWVARFPKGEEQNLEDVLPKGFLERVGDRGRVLDHLVPQAHILNHPSTGGFISHCGWNSVMESIDFGVPIIAMPMQWDQPINARLLVELGVAVEIVRQEDGRIHRGAIAQVLKDVISGPTGEKLRANVRDIAKRLRARREEEMTAAAEELIRLCRNRNAYK

SEQ ID NO: 710 - protein, 440 aa, Artificial Sequence
  engineered beta-1,2-glycosyltransferase encoded in plasmid pA32942
QLLQVLMFPWLALGHVNPFLRIAKQLADRGFVIYLVSTAVNLELIKKRIPNKYSNSIHLVELALPELPELPSHLHTTNGLPPHLNGVLHKALKMSAPNFSKILQDLKPALVLYDFLQPWAEKVALEQGIPAVPLLTSGAALFAYFFNFLKRPGHEFPFPAIRLSKREQDKMREMFGTEPTELDFLAPFQAGIMLMCTSRVIEAKYLDYCTKLTNVKVVPVGAPFQDPLTEDIDDPELIRWLDTKPENSVVYVSFGSEYFLSREDMEEIAFGLELSNVNFIWVVRFPKGVEQNLEDVLPPGFLERVGDRGRVLDHLVPQAHILNHKSTGGFISHCGWNSVMESIDFGVPIIAMPMQWDQPINARLLVELGVAVEIVRDEDGRIHRDEIAQVLKDVISGPLGEILRANVRDIAKRLRARREVEMNIAAEELIQLCRKRNAYK

SEQ ID NO: 711 - protein, 440 aa, Artificial Sequence
  engineered beta-1,2-glycosyltransferase encoded in plasmid pA32943
QLLQVLMFPWLALGHVNPFLRIAKQLADRGFVIYLVSTAVNLESIKKRIPNKYSNSIHLVELALPELPELPPHLHTTNGLPPHLNGVLHKALKMSAPNFSKILQDLKPALVLYDFLQPWAEKVALEQGIPAVPLLTSGAALFAYFFNFLKRPGHEFPFPAIRLSKREQDKMREMFGTEPTEEDFLAPFQAGIMLMCTSRVIEAKYLDYCTKLTNVKVVPVGPPFQDPLTEDIDDPELIRWLDTKPENSVVYVSFGSEYFLSREDMEEIAFGLELSNVNFIWVVRFPKGVEQNLEDVLPKGFLERVGDRGRVLDHLVPQAHILNHPSTGGFISHCGWNSVMESIDFGVPIIAMPMQWDQPINARLLVELGVAVEIVRDEDGRIHRDEIAQVLKDVISGPTGEILRANVRDIAKRLRARREVEMNIAAEELIQLCRKRNAYK

SEQ ID NO: 712 - protein, 440 aa, Artificial Sequence
  engineered beta-1,2-glycosyltransferase encoded in plasmid pA32944
QTLRVLMFPWLALGHVNPFLRIAKQLADRGFVIYLVNTAVNLESIKKRIPNKYSNSIHLVELALPELPELPSHYHTTNGLPPHLNGVLHKALKMSAPNFSKTLQNLKVDLVLYDFLQPWASKLALERGIPAVPLLTSGAALFAYFFNFLKRPGHEFPFEAIRLSKREQDKMREMFGTEPTEEDFLAPANAGIMLMCTSRVIEAKYLDYCMKLTNVKVVPVGPTFQDPLPEDIDDPELIDWLDTKPENSVVYVSFGSEYFLSREDMEEVAFGLELSNVNFIWVARFPKGEEQHLIDVLPPGFLERVGDRGRVLDHLVPQAHILNHKSTGGFISHCGWNSVMESIDFGVPIIAMPMQWDQPINARLLVELGVAVEIRRDEDGRIHRDEIAQVLKDVISGPLGEILRANVRDIAKRLRARREVEMNIAAEELILLCRNRSAYK

SEQ ID NO: 713 - protein, 440 aa, Artificial Sequence
  engineered beta-1,2-glycosyltransferase encoded in plasmid pA32945
QTLRVLMFPWLALGHVNPFLRIAKQLADRGFVIYLVNTAVNLESIKKRIPNKYSNSIHLVELALPELPELPSHYHTTNGLPPHLNGVLHKALKMSAPNFSKTLQNLKVDLVLYDFLQPWASKLALERGIPAVPLLTSGAALFAYFFNFLKRPGHEFPFEAIRLSKREQDKMREMFGTEPTEEDFLAPANAGIMLMCTSRVIEAKYLDYCMKLTNVKVVPVGPTFQDPLTEDIDDPELIDWLDTKPENSVVYVSFGSEYFLSREDMEEVAFGLELSNVNFIWVARFPKGEEQHLEDVLPKGFLERVGDRGRVLDHLVPQAHILNHKSTGGFISHCGWNSVMESIDFGVPIIAMPMQWDQPINARLLVELGVAVEIRRDEDGRIHRDEIAQVLKDVISGPTGEILRANVRDIAKRLRARREEEMNAAAEELIQLCRNRSAYK

SEQ ID NO: 714 - protein, 440 aa, Artificial Sequence
  engineered beta-1,2-glycosyltransferase encoded in plasmid pA32946
QTQQVLMFPWLALGHVNPFLRIAKQLADRGFVIYLVSTAINLELAKKRIPYKYSNSIHLVEYALPELPELPPHLHTTNGLPPHLNGTLHKALKMSAPEFSKQVQNLKPDLVLYDFLIPWAEKVALSQGVPGVPLLTSGAALFSYFFNFLKRPGHEFPFPAIRLSKREQDKMREMFGTEPTELDFLVPANAGIMLMCTSRVIEAKYLDYCQKLTNVKVVPVGAPFQDPLTEDIYDPELIRWLDTKPPNSVVYVSFGSEYFLSREQMEEVAFGLELSGVNFIWVARFPKGEEQNLEDVLPKGFLERVGDRGRVLDHLVPQAHILNHKSTGGFISHCGWNSVMESIDFGVPIIAMPMQWDQPINARLLVELGVAVEIRRDEDGRIHRDEIAQVLKDVISGPTGEILRANVRDIALRLRARREEEMNAAAEELLQLCRNRRALK

SEQ ID NO: 715 - protein, 440 aa, Artificial Sequence
  engineered beta-1,2-glycosyltransferase encoded in plasmid pA32947
QTQQVLMFPWLALGHVNPFLRIAKQLADRGFVIYLVSTAINLELAKKRIPYKYSNSIHLVEYALPELPELPPHYHTTNGLPPHLNGTLHKALKMSAPEFSKQVQNLKPDLVLYDFLIPWAEKVALSQGVPGVPLLTSGAALFSYFFNFLKRPGHEFPFPAIRLSKREQDKMREMFGTEPTEEDFLVPANAGIMLMCTSRVIEAKYLDYCQKLTNVKVVPVGPPFQDPLTEDIYDPELIRWLDTKPENSVVYVSFGSEYFLSREQMEEVAFGLELSGVNFIWVARFPKGEEQNLEDVLPKGFLERVGDRGRVLDHLVPQAHILNHPSTGGFISHCGWNSVMESIDFGVPIIAMPMQWDQPINARLLVELGVAVEIRRDEDGRIHRDEIAQVLKDVISGPTGEILRANVRDIAKRLRARREEEMNAAAEELLQLCRNRRAYK

SEQ ID NO: 716 - protein, 440 aa, Artificial Sequence
  engineered beta-1,2-glycosyltransferase encoded in plasmid pA32948
QTLRVAMFPWLALGHVNPFLRIAKQLADRGFVIYLVSTAINLESAKHRIPEKYSDSIHLVELALPLLPELPPHYHTTNGLPPHLNGTLHKALKMSAPEFSKQLQTINATLVLYDFLQPWAEKVALDQGIPAVPLLTFGAALFSYFFNFLKRPGHPFPFPAIRLSKREQDKMREMFGTEPTEEDFLAPANAGIMLMCTSRVIEAKYLDYCQKLTNVKVVPVGPPFQDPLTEDIGDPELIDWLDTKPLNAVVYVSFGSEYFLSREQMEEVAFGLELSNANFIWVARFPKGAEQLLIDVLPKGFLERVGDRGRVLDHLVPQAHILNHPSTGGFMSHCGWNSVMESIDFGVPIIAMPMQWDQPINARLLVELGVAVEIVRREDGRIHRDEIAQVLKDVISGPTGEILRANVADIGRRLRARREEEMNAAAEELIRLGRNRLAYN

SEQ ID NO: 717 - protein, 440 aa, Artificial Sequence
  engineered beta-1,2-glycosyltransferase encoded in plasmid pA32949
QTLRVAMFPWLALGHVNPFLRIAKQLADRGFVIYLVSTAINLESAKHRIPEKYSDSIHLVELALPLLPELPPHYHTTNGLPPHLNGTLHKALKMSAPEFSKQLQTINATLVLYDFLQPWAEKVALDQGIPAVPLLTFGAALFSYFFNFLKRPGHEFPFPAIRLSKREQDKMREMFGTEPTEEDFLAPANAGIMLMCTSRVIEAKYLDYCQKLTNVKVVPVGPPFQDPLTEDIGDPELIDWLDTKPENAVVYVSFGSEYFLSREQMEEVAFGLELSNANFIWVARFPKGAEQLLEDVLPKGFLERVGDRGRVLDHLVPQAHILNHPSTGGFMSHCGWNSVMESIDFGVPIIAMPMQWDQPINARLLVELGVAVEIVRREDGRIHRDEIAQVLKDVISGPTGEILRANVADIGRRLRARREEEMNAAAEELIRLGRNRLAYN

SEQ ID NO: 718 - protein, 440 aa, Artificial Sequence
  engineered beta-1,2-glycosyltransferase encoded in plasmid pA32950
QTLRVLMFPWLALGHVNPFLRIAKQLADRGFVIHLVSTAVVLESAKKRIPNKYSNSIHLVELALPLLPELPSHYHTTNGLPPHLNGTLHKALKMSAPEVSKTLQNLKADLVLYDFLQPWAEKVALEQGIPAVPLLTSGAALFAYFFNFLKRPGHEFPFPAIRLSKREQDKLREMFGTEPTEEDFLAPANAGYMLMCTSRVIEAKYLDYCQKLTNVKVVPVGPSFQDPLPEDIDDPELIRWLDTKPENSVVYVSFGSEYFLSREDMEEVAFGLELSNSNFIWVARFPKGREQHLEDVLPPGFLERVGDRGRVLDHLVPQAHILNHKSTGGFISHCGWNSVMESIDFGVPIIAMPMQWDQPINARLLRELGVAVEIRRQEDGRIHRGEIAQVLKDVISGPTGEKLRANVRDIAKRLRARREVEMNIAALALLKLCRNRSASN

SEQ ID NO: 719 - protein, 440 aa, Artificial Sequence
  engineered beta-1,2-glycosyltransferase encoded in plasmid pA32951
QTLRVLMFPWLALGHVNPFLRIAKQLADRGFVIHLVSTAVVLESAKKRIPNKYSNSIHLVELALPLLPELPSHYHTTNGLPPHLNGTLHKALKMSAPEVSKTLQNLKPDLVLYDFLQPWAEKVALEQGIPAVPLLTSGAALFAYFFNFLKRPGHEFPFPAIRLSKREQDKLREMFGTEPTEEDFLAPANAGYMLMCTSRVIEAKYLDYCQKLTNVKVVPVGPPFQDPLTEDIDDPELIRWLDTKPENSVVYVSFGSEYFLSREDMEEVAFGLELSNSNFIWVARFPKGREQHLEDVLPKGFLERVGDRGRVLDHLVPQAHILNHKSTGGFISHCGWNSVMESIDFGVPIIAMPMQWDQPINARLLRELGVAVEIRRQEDGRIHRGEIAQVLKDVISGPTGEKLRANVRDIAKRLRARREVEMNIAALALLKLCRNRSASN

SEQ ID NO: 720 - protein, 440 aa, Artificial Sequence
  engineered beta-1,2-glycosyltransferase encoded in plasmid pA32952
QTLRVLMFPWLALGHVNPFLRIAKQLADRGFVIHLVSTAVVLESAKKRIPNKYSNSIHLVELALPELPELPSHYHTTNGLPPHLNGTLHKALKMSAPEVSKTLQNLKPDLVLYDFLQPWAEKVALEQGIPAVPLLTSGAALFAYFFNFLKRPGHEFPFPAIRLSKREQDKLREMFGTEPTEEDFLAPANAGYMLMCTSRVIEAKYLDYCQKLTNVKVVPVGPPFQDPLTEDIDDPELIRWLDTKPENSVVYVSFGSEYFLSREDMEEVAFGLELSNSNFIWVARFPKGREQHLEDVLPKGFLERVGDRGRVLDHLVPQAHILNHKSTGGFISHCGWNSVMESIDFGVPIIAMPMQWDQPINARLLRELGVAVEIRRQEDGRIHRGEIAQVLKDVISGPTGEKLRANVRDIAKRLRARREEEMNIAAEALLKLCRNRSASN

SEQ ID NO: 721 - protein, 440 aa, Artificial Sequence
  engineered beta-1,2-glycosyltransferase encoded in plasmid pA32953
QTLRVLMFPWLALGHVNPFLRIAKQLADRGFVIYLVSTAINLESLKHRIPEKYFNSIHLVELALPHLPELPSHLHTTNGLPPHLNGTLHKALKMSAPEFSKILQNLNADLVLYDFLQPWAEKVALSQGIGAVPLLTSGAALFAYFFQFLDRPGHEFPFPAIRLSKREQDKMREMFGTEPTEEDFLAPGNAGAMLMCTSRVIEAKYLDYCQKLTNVKVVPVGATFQDALFEDISDPELIRWLDTKPPNSVVYVSFGSEYFLSREQMEEIAFGLELSGVNFIWVARFPKGEEQNLEDVLPPGFSERVGDRGRVLDHLVPQAHILNHPSTGGFISHCGWNSVMESIDFGVPIIAMPMQWDQPINARLLRELGVAVEIPRQEDGRIHRNEIAQVLKDVISGPLGEKLRANVADIARRLRARREEEMNAAAEELLQLCRHRAALK

SEQ ID NO: 722 - protein, 440 aa, Artificial Sequence
  engineered beta-1,2-glycosyltransferase encoded in plasmid pA32954
QTLRVLMFPWLALGHVNPFLRIAKQLADRGFVIYLVSTAINLESLKHRIPEKYFNSIHLVELALPHLPELPSHLHTTNGLPPHLNGTLHKALKMSAPEFSKILQNLNPDLVLYDFLQPWAEKVALSQGIGAVPLLTSGAALFAYFFQFLDRPGHEFPFPAIRLSKREQDKMREMFGTEPTEEDFLAPGNAGAMLMCTSRVIEAKYLDYCQKLTNVKVVPVGPTFQDALFEDISDPELIRWLDTKPENSVVYVSFGSEYFLSREQMEEIAFGLELSGVNFIWVARFPKGEEQNLEDVLPKGFSERVGDRGRVLDHLVPQAHILNHPSTGGFISHCGWNSVMESIDFGVPIIAMPMQWDQPINARLLRELGVAVEIPRQEDGRIHRNEIAQVLKDVISGPTGEKLRANVADIARRLRARREEEMNAAAEELLQLCRHRAAYK

SEQ ID NO: 723 - protein, 440 aa, Artificial Sequence
  engineered beta-1,2-glycosyltransferase encoded in plasmid pA32955
PTLQVLMFPWLALGHVNPFLRIAKQLADRGFVIHLQSTSVVLESAKKRIPEKYSDSIHLVELALPLLPELPSHYHTTNGLPPHLNGTLHKALQMSAPEFSKILQNLNPDLVLYDFLQPWAEKVALEQGIPAVPLLTSGAALFAYFFNFLKRPGREFPFPAISLSKREQDKMREMFGTEPTELDFLAPGNAKIMLMCTSRVIEAKYLDYCQKLTNVKVVPVGPPFQDPLTLDISDPELIRWLDTKPPNSVVYVSFGSEYFLSREDMEEVAFGLELSNVNFIWVARFPKGVEQNLEDVLPPGFLERVGDRGRVLDHLVPQAHILNHKSTGGFISHCGWNSVMESIDFGVPIIAMPMQWDQPINARLLVELGVAVEIVRQEDGRIHRGAIAQVLKDVISGPTGEKLRKNVRDIAKLLRAAREVEMTIAALELIRLGRHRNAYK

SEQ ID NO: 724 - protein, 440 aa, Artificial Sequence
  engineered beta-1,2-glycosyltransferase encoded in plasmid pA32956
DLLQVLMFPWLALGHVNPFLRIAKQLADRGFIIYLVSTMVNLELIKKRIPNKYSSSIILVELALPELPELPSHLHTTNGLPPHLNGVLHKALKMSAPNFSKILQNLKPALVLYDFLQPWAEKVALEQGIPAVPLLTSGAALFAYFFNFLKRPGEEFPFPAISLSKLEQDKMREMFGREPTEEDFLAVFQAAIMLMCTSRVIEAKYLDYCTKLTNVKVVPVGAPFQDPLTEDISDPELIRWLDTKPENSVVYVSFGSEYFLSREDMEEIAFGLELSNVNFIWVVRFPKGVEQNLEDVLPPGFLERVGDRGRVLDHLVPQAHILNHKSTGGFISHCGWNSVMESIDFGVPIIAMPMQWDQPINARLLVELGVAVEIVRDEDGRIHRDEIAQVLKDVIFGPLGEILRRNVRDIAKRLRAAREVEMNIAAEELIQLCRKLNAYK

SEQ ID NO: 725 - protein, 440 aa, Artificial Sequence
  engineered beta-1,2-glycosyltransferase encoded in plasmid pA32957
DLLQVLMFPWLALGHVNPFLRIAKQLADRGFIIYLVNTMVNLELIKKRIPNKYSSSIILVELALPELPELPSHLHTTNGLPPHLNGVLHKALKMSAPNFSKILQNLKAALVLYDFLLPWAEKVALEQGIPAVPLLTSGAALFAYFFNFLKRPGEEFPFPAISLSKLEQDKMREMFGREPTEEDFLAVFQAAIMLMCTSRVIEAKYLDYCTKLTNVKVVPVGAPFQDPLTEDISDPELIRWLDTKPENSVVYVSFGSEYFLSREDMEEIAFGLELSNVNFIWVVRFPKGVEQNLEDVLPPGFLERVGDRGRVLDHLVPQAHILNHKSTGGFISHCGWNSVMESIDFGVPIIAMPMQWDQPINARLLVELGVAVEIVRDEDGRIHRDEIAQVLKDVIFGPLGEILRRNVRDIAKRLRAAREVEMNIAAEELIQLCRKLNAYK

SEQ ID NO: 726 - protein, 440 aa, Artificial Sequence
  engineered beta-1,2-glycosyltransferase encoded in plasmid pA32958
QTQQVLMFPWLALGHVNPFLRIAKQLADRGFVIYLVSTAINLELAKKRITNKYSNSIHLVTYALPELPELPPHLHTTNGLPPHLNGTLHKALKMSAPEFSKQVQNLKPDLVLYDFLIPWAEKVALSQGVPGVPLLTFGAALFSYFFNHLKRPGHEFPFPAIRLSKRELDKLYEMFGTEPTELDFLVPANAGIMLMCTSRVIEAKYLDYCQKLTNVKVVPVGAPFRDPLTEDIYDPELIRWLDTKPPNSVVYVSFGSEYFLSREQMEEVAFGLELSGVNFIWVARFPKGEEQNLEDVLPKGFLERVGDRGRVLDHLVPQAHILNHKSTGGFISHCGWNSVMESIDFGVPIIAMPMQWDQPINARLLVELGVAVEIRRQEDGRIHRDEIAQVLKDVISGPTGEILRANVRDIALRLRARREEEMTAAALELLALCRNRRALK

SEQ ID NO: 727 - protein, 440 aa, Artificial Sequence
  engineered beta-1,2-glycosyltransferase encoded in plasmid pA32959
QTLRVLMFPWLALGHVNPFLRIAKQLADRGFVIYLVSTAINLNSTKKRIPEKYSDLIHLVELTLPLLPELPPHYHTTNGLPPALNATLHKALKLARPNFSKQLSTLNPDLVVYDFLQPWAEKVALSQGICAVPLATFGAALFSYMFNFLKRPGHEFPFPAIRLSKREQDKMREMLNTEPTEEDFLAPANAGIMLMCTSRVIEAKYLDYCQELTGVKVVPVGPSFQDPLTEDIDDPELIDWLDTKPENSVVYVSFGSEYFLSREQMEEVAFGLELSNANFIWVARFPKGAEQLLIDVLPKGFLDRVGDRGRVLDGLVPQAHILSHPATGGFISHCGWNSVMEAIDFGVPIIAMPMQWDQPINARLLVELGVAVEIVRREDGRIHREEIAQVLKDVIGGPTGEILRAKVRDIGRRLRARREEEMNAAAEELIKLGRNHLAYN

SEQ ID NO: 728 - protein, 440 aa, Artificial Sequence
  engineered beta-1,2-glycosyltransferase encoded in plasmid pA32960
QTLRVLMFPWLALGHVNPFLRIAKQLADRGFVIYLVSTAVNLESTRKRIPEKYSDLIHLVELALPLLPELPPYYWTTNGLPPHLNGTLHKALKLSRPNFSKILSTLNATLVVYDFLQPWAEKVALSQGIPAVPLATSGAALFSYFFNFLKRPGHPFPFPEIRLSKREQDKMREMFGTEPTEEDFLAPANAGIMLMCTSRVIEAKYLDYCQELTGVKVVPVGPSFQDPVTEDIDDPELIDWLDTKPLNAVVYVSFGSEYFLSREQMEEVAFGLELSNANFIWVARFPKGEEQNLEDVLPKGFLDRVGDRGRVLDHLVPQAHILNHPATGGFISHCGWNSVMESIDFGVPIIAMPMQWDQPINARLLVELGVAVEIVRREDGRIHREEIAKCLKDVIGGPTGQILRHNVRDIGRRLRARRDEEMNAAAEELIKLGRNLSAYN

SEQ ID NO: 729 - protein, 440 aa, Artificial Sequence
  engineered beta-1,2-glycosyltransferase encoded in plasmid pA32962
QTLTVLMFPWLALGHVNPFLRIAKQLADRGFVIYLVNTAINLESLKHRIPYKYVNSIHLVELALPELPELPSHLHTTNGLPPHLNGLLHKALKMSAPTFSKILQALKPTLVLYDFLQPWAEKVALSQGIPAVPLLTSGAALFAYFVEFLDRPGHEFPFPAIRLSKREQDKMREMFGTEPTELDFLAPANAGIMLMCTSRVIEAKYLDYCAKLTNVKVVPVGPPFQDPLFEDISDPELIDWLDTKPTNSVVYVSFGSEYFLSREDMEEIAFGLELSGVNFIWVVRFPKGEEQTLEDVLPKGFSERVGDRGRVLDHLVPQAHILNHPSTGGFISHCGWNSVMESIDFGVPIIAMPMQWDQPINARLLVELGVAVEIVRDEDGRIHRDAIAQVLKDVISGPLGEILRANVADIATRLRARREEEMNIAAEELIQLCRHRAAFK

SEQ ID NO: 730 - protein, 440 aa, Artificial Sequence
  engineered beta-1,2-glycosyltransferase encoded in plasmid pA32963
QTLRVLMFPWLALGHVNPFLRIAKQLADRGFVIYLVSTAINLELIKKRIPYKYLNSIHLVEYALPELPELPPHLHTTNGLPPHLNGLLHKALKMSAPTYSKIIRNLSITLVLYDFLLPWAEKVALEQGIPAVPLLTSGAALFAYFFNFLKRPGHEFPFPAIRLSKRELDKMREMFGTEPTELDFLAPANAGIMLMCTSRVIEAKYLDYLSKLTNVKVVPVGPSFQLMLMEDISDPELIDWLDTKPPNSVVYVSFGSEYFLSREQMEEIAFGLELSNVNFIWVVRFPKGEEQTLIDVLPPGFLERVGDRGRVLDHLVPQAHILNHKSTGGFISHCGWNSVMESIDFGVPIIAMPMQWDQPINARLLVELGVAVEIVRDEVGRIHRDEIAQVLKDVISGPLGEILRANVRDIARRLRARREEEMNAAALALLLLCRRRRALN

SEQ ID NO: 731 - protein, 440 aa, Artificial Sequence
  engineered beta-1,2-glycosyltransferase encoded in plasmid pA32965
QLLQVLMFPWLALGHVNPFLRIAKQLADRGFVIYLVNTAVNLESIKKRIPEKYSNSIHLIELALPELPELPSHLHTTNGLPPHLNGVLRKLLKLAAPNFSKILQDLKAALVLYDFLLPWAEKVALEQGIPAVPLLTSGAALFAYFFNFLKRLGHEFLFPEIRLSKRAQDKMREAFGTVPTEEDFLAPFRAGIMLMCTSRVIEAKYLDYCTKLTGVKVVPVGTPFQDPLTEDIDDPELIRWLDTKPENSVVYVSFGSEYFLSREDMEEIAWGLVLSNVNFIWVVRFPKGVEQNLEDVLPPGFLDRVRDRGRVLPHLVPQAHILNHKATGGFISHCGWNSVMESIDFGVPIIAMPMQWDQPINARLLVELGVAVEIVRDEDGRIPRDEIAQVLRDVISGPLGEILRANVRDIAKRLRARREVEMNIAAEELIQLCRKRNAYK

SEQ ID NO: 732 - protein, 440 aa, Artificial Sequence
  engineered beta-1,2-glycosyltransferase encoded in plasmid pA32966
QLLQVLMFPWLALGHVNPFLRIAKQLADRGFVIYLVSTAVNLESIKKRIPEKYSNSIHLIELALPELPELPSHLHTTNGLPPHLNGVLRKLLKLAAPNFSKILQDLKPALVLYDFLQPWAEKVALEQGIPAVPLLTSGAALFAYFFNFLKRLGHEFLFPEIRLSKRAQDKMREAFGTVPTEEDFLAPFRAGIMLMCTSRVIEAKYLDYCTKLTGVKVVPVGPPFQDPLTEDIDDPELIRWLDTKPENSVVYVSFGSEYFLSREDMEEIAWGLVLSNVNFIWVVRFPKGVEQNLEDVLPKGFLDRVRDRGRVLPHLVPQAHILNHPATGGFISHCGWNSVMESIDFGVPIIAMPMQWDQPINARLLVELGVAVEIVRDEDGRIPRDEIAQVLRDVISGPLGEILRANVRDIAKRLRARREVEMNIAAEELIQLCRKRNAYK

SEQ ID NO: 733 - protein, 440 aa, Artificial Sequence
  engineered beta-1,2-glycosyltransferase encoded in plasmid pA32967
QTQQVLMFPWLALGHVNPFLRIAKQLADRGFVIYLVSTAINLELAKKRIPYKYSNSIHLVTYSLPELPELPPHLHTTNGLPPHLNGTLHKALQMSRPEFSKQVQNLKPDLVLYDFLIPWAEKVALDQGVPAVPLLTSGAALFSYFFNFLKRPGNEFPFPAIRLSKREQDKMREMFGTEPTELDFLVPANAAIMLMCTSRVIEAKYLDYCQKLTNVKVVPVGAPFQDPLTLDLYDPELIRWLDTKPPNSVVYVSFGSEYFLSREQMEEVAFGLELSGVNFIWVARFPKGEEQNLEDVLPKGFLERVGDRGRVLDHLVPQACILNHKSTGGFISHCGWNSVMESIDFGVPIIAMPMQWDQPINARLLVELGVAVEIRRDEDGRIHRDEIAQVLKDVINGATGEILRRNVRDIALRLRARREEEMTAAALELLALCRNLRALK

SEQ ID NO: 734 - protein, 440 aa, Artificial Sequence
  engineered beta-1,2-glycosyltransferase encoded in plasmid pA32968
QTLRVTMFPWLALGHVNPFLRIAKQLADRGFVIYLVNTAINLESLKHRITEKYFFSIHLVELALPHLPELPSHLHTTNGLPPHLNGTLHKALKMSAPELSKILQNLNADLVLYDFLQPWAEKSALSQGVGAVPLLTSGAALFAYFFQFLDRPGHEFPFPAIRLSKREQDKMREMFGTEPTEEDFLAPGNAGAMLMCTSRVIEAKYLDYCQKLTNVKVVPVGATFQDALFEDISDPELIRWLDTKPPNSVVYVSFGSEYFLSREQMEEIAFGLELSGVNFIWVARFPKGEEQNLEDVLPEGFSERVGDRGRVRDHLVPQAHILNHPSTGGFISHCGWNSVMESIDFGVPIIAMPMQWDQPINARLLRELGVAVEIPRQEDGRIHRNEIAQVLKDVISGPLGEKLRANVADIAKRLRARREEEMNAAAEELLQLCRHRAALK

SEQ ID NO: 735 - protein, 440 aa, Artificial Sequence
  engineered beta-1,2-glycosyltransferase encoded in plasmid pA32969
PTLRVLMFPWLALGHVLPFLRIAKQLADRGMVIHLQSTSVVLESAKKRIPEKYSDSIHLVELALPLLPELPSHYHTTNGLPPHLNAVLHKALQMSAPEFSKILQNLNPDLVLYDFLQPWAEKVALEQGIPAVPLLTSGAALFAYFFNFLKRPGQEFPFPAISLSKREQDKMREMFGTEPTELDFLAPGNAKIMLMCTSRVIEAKYLDYCQKLTNVKVVPVGPPFQDPLTLDISDPELIRWLDTKPPNSVVYVSFGSEAFLSREDMEEVAFGLELSNVNFIWVARFPKGREQNLIDVLPPGFLERVGDRGRVRDGLVPQAHILNHKSTGGFISHCGWNSVMESIDFGVPIIAMPMTWDQPINARLLVELGVAVEIVRDEDGRIHRDAIAQVLKDVISGPTGEKLRRNVRDIAKLLRAAREVEMTIAAEELIRLGRHRNAYK

SEQ ID NO: 736 - protein, 440 aa, Artificial Sequence
  engineered beta-1,2-glycosyltransferase encoded in plasmid pA32970
QSQRVLMFPWLALGHVNPFLRIAKQLADRGFVIYVVSTAINLELAKKRIPNKYLNSIHLVTYALPELPELPSHLHTTNGLPPHLNGLLHKALKMSAPEFSKIIRNLKASLVLYDFLLPWAEKVALEQGVPAVPLLTSGAALFAYFFNFLTRPGHEFPFPAIRLSKREQDKMREMFGTEPTELDFLAPANAGAMLMCTSRVIEAKYLDYCAKLTNVKVVPVGASFQDPLYEDISDPELIRWLDTKPPNSVVYVSFGSEYFLSREDMEEVAFGLELSNVNFIWVARFPKGAEQTLIDVLPPGFLERVGDRGRVLDHLVPQAHILNHKSTGGFISHCGWNSVMESIDFGVPIIAMPMQWDQPINARLLRELGVAVEISRDELGRIHRNEIAQVVKDVISGPTGEKLRANVRDIARRLRARREEEMNAAAEELMKLCRNRSAAN

SEQ ID NO: 737 - protein, 440 aa, Artificial Sequence
  engineered beta-1,2-glycosyltransferase encoded in plasmid pA32971
QTLRVLMFPWLALGHVNPFLRIAKQLADRGFVIHLVSTAVVLESAKKRIPNKYSSSIQLVELSLPLLPELPSHYHTTNGLPPHLNGTLHKALKMSAPEVSKTLQNLKADLVLYDFLQPWAEKVALEQGIPAVPLLTSGAALFAYFFNFLKRPGNEFPFEAISLSKREQDKLREMFGREPTEEDFLAPANAGYMLMCTSRVIEAKYLDYCQKLTNVKVVPVGPSFQDPRQEDIDDPELIRWLDTKPENSVVYVSFGSEYFLSREDMEEVAFGLELSNSNFIWVARFPKGREQHLEDVLPPGFLERVGDRGRVLDHLVPQAHILNHKSTGGFISHCGWNSVMESIDFGVPIIAMPMQWDQPINARLLRELGVAVEIRRQEDGRIHRGEIAQVLKDVIQGPTGEKLRRNVRDIAKLLRASREVEMNIAALALIKLCRNRSASN

SEQ ID NO: 738 - protein, 440 aa, Artificial Sequence
  engineered beta-1,2-glycosyltransferase encoded in plasmid pA32972
GTLRVLMFPWLALGHVNPFLRIAKQLADRGFVIHLQSTAVNLESAKKRIPEKYSDSIHLVELALPELPELPSHYHTTNGLPPHLNGTLRKALKMAAGNFSKILQNLKPDLVLVDFLQPWASKVALEQGIPAVRLLTSGAALFAYFFNFLKRLGQEFPFEEIRLSKRAQDKLREAFGTEPTELDFLAPQNAGIMLMCTSRVIEAKYLDYCTKLTGVKVVPVGPPFQDPLTEDISDPELIRWLDTKPPNSVVYVSFGSEYFLSREDMEEVAFGLELSNVNFIWVARFPKGVEQNLEDVLPPGFLDRVRDRGRVLPHLVPQAHILSHPATGGFISHCGWNSVMESIDFGVPIIAMPMQWDQPINARLLVELGVAVEIVRDEDGRIPREAIAKVLKDVISGPTGEKLRANCRDLAKLLRAAREVEMTIAALELIRLGRNRNAYK

SEQ ID NO: 739 - protein, 440 aa, Artificial Sequence
  engineered beta-1,2-glycosyltransferase encoded in plasmid pA32973
QTLRVLMFPWLALGHVNPFLRIAKQLADRGFVIYLVSSAINLESLRHRIPEKYSFSIHLVELALPELPELPSHYHTTNGLPPHLNGTLHKALKMSAGEFSKILQNLKADLVLYDFLQPWAEKVALEQGVCAVPLLTSGAALFAYFFNFLDRPGNEFPFPAIRLSKREQAKMREAFGKEPTEEDFLAPGNAGAMLMCTSRVIEAKYLDYCTKLTNVKVVPVGPTFQDATFEDLSDTELIRWLDTKPPNSVVYVSFGSEYFLSRRQMEEIAFGLELSGVNFIWVARFPKGEEQNLEDVLPPGFLDRARDRGRVLDHLVPQAHILNHPSTGGFISHCGWNSVMESIDFGVPIIAMPMQWDQPINARLLRELGVAVEVPRQEDGRIHRSEIAQVVKDVIFGPTGQKLRANVADIAKLLRARREEEMDAAAEELLQLCRHRAAYK

SEQ ID NO: 740 - protein, 440 aa, Artificial Sequence
  engineered beta-1,2-glycosyltransferase encoded in plasmid pA32977
LTLRVLMFPWLALGHVNPFLRLAKQLADRGFVIYLVNTNINLESLRHRIPEKYFFSIHLVELALPLLPELPSHLHTTNGLPPHLNGTLRKALKMSAGNFSKILQNLNADLVLYDFLQPWAEKVALSQGIPAVPLLTSGAALFAYFFNFLDRPGNEFPFPAIRLSKREQAKMREAFGKEPTEEDFLAPGNAGAMLMCTSRVIEAKYLDYCQELTNVKVVPVGTTFQDATTEDLDDTELIRWLDTKPPNSVVYVSFGSEYFLSREDMEEIAFGLELSNVNFIWVARFPKGEEQNLEDVLPPGFSDRAGDRGRVLDHLVPQAAILNHPSTGGFISHCGWNSVMESIDFGVPIIAMPMQWDQPINARLLRELGVAVEVPRQEDGRIHRSEIAQVVKDVIFGPTGEILRKNSRDIAKLLRARREEEMDAAAEELLQLCRHLAAYK

SEQ ID NO: 741 - protein, 440 aa, Artificial Sequence
  engineered beta-1,2-glycosyltransferase encoded in plasmid pA32978
QILTVLMFPWLALGHVNPFLRIAKDLADRGFVIYLVSTAVNLESLKKRITNKYSPSIHLVTLALPELPELPPHLHTTNGLPPHLNGLLHKALQMSAPNFSKILQTLNIDLVLYDFLLPWACKVALSQGIPAVPLLTSGAALFAYFFNFLKRPGHEFPFEAIRLSKREQDKLLEMFGTESTELDFLVPFQAGIMLMCTSRVIEAKYLDYLAKLTNVKVVPVGPTFLVPLTEDIDDPELIRWLDTKPTNSVVYVSFGSEYFLSREQMEEIAFSLELSNVNFIWVVRFPKGEEQTLEDVLPPGFLERVGDRGRVLDHLVPQAHILNHKSTGGFISHCGWNSVMESIDFGVPIIAMPMQWDQPINARLLRELGVAVEIRRDEDGRIHRDEIAQVLKDVISGPTGEKLRANVADIARRLRARREEEMNIAAEELIKLGRHRLASK

SEQ ID NO: 742 - protein, 440 aa, Artificial Sequence
  engineered beta-1,2-glycosyltransferase encoded in plasmid pA32979
QTLTVAMFPWLALGHVNPFLRIAKDLADRGHVIYFVSTAVVLESAKKRIPNKYLSSIHLVTLALPELPELPPHYHTTNGLPPHLNGVLHKALQMSAPGLSKISQNLKLDLVLYDFLQPWAEKVALSRGVPAVPLLTSGAALFAYFFNFLKRPGHEFPFEAIRLSKREQDKLREMFGTESTELDFLAPANAGATLMCTSRVIEAKYLDYCAKLTNVKVVPVGPTFQTPLTEDIDDPELIRWLDTKPPNSVVYVSFGSEYFLSREQMEEVAFSLELSNVNFIWVARFPKGREQTLEDVLPPGFLERVGDRGRVRDHLVPQAHILNHKSTGGFISHCGWNSVMESIDFGVPIIAMPMQWDQPINARLLRELGVAVEIRRDEDGRIHRNEIAQVLKDVISGPTGEKLRANVADIAKRLRARRELEMNAAALELILLGRHRLASK

SEQ ID NO: 743 - protein, 440 aa, Artificial Sequence
  engineered beta-1,2-glycosyltransferase encoded in plasmid pA32980
QTLRVTMFPWLALGHVNPFLRIAKQLADRGFVIYLVNTKINLESLRHRIPEKYSFSIHLVELALPHLPELPSHLHTTNGLPPHLNGTLHKALKMSAPELSKQLQNLNSDLVLYDFLQPWAEKSALSQGVGAVPLLTSGAALFAYFFNFLDRPGNEFPFPAIRLSKREQAKMREMFGKEPTEEDFLAPGNANAMLMCTSRVIEAKYLDYCQKLTNVKVVPVGATFQDATFEDLSDPELIRWLDTKPPNSVVYVSFGSEYFLSREDMEEIAFGLELSGVNFIWVARFPKGEEQNLEDVLPPGFSERVGDRGRVLDHLVPQASILNHPSTGGFISHCGWNSVMESIDFGVPIIAMPMQWDQPINARLLRELGVAVEIPRQEDGRIHRNEIAQVLKDVIFGPTGEKLRKNVADIAKLLRARREEEMNAAAEELLQLCRHRAALK

SEQ ID NO: 744 - protein, 440 aa, Artificial Sequence
  engineered beta-1,2-glycosyltransferase encoded in plasmid pA32981
QTLRVLMFPWLALGHVNPFLRIAKQLADRGFVIHLVSTAVVLESAKKRIPEKYSNSIHLVELALPLLPELPSHYHTTNGLPPHLNGTLRKALQMAAGNFSKILQNLRPDLVLVDFLQPWASKVALEQGIPAVPLLTSGAALFAYFFNFLKRLGHEFPFEEIRLSKRAQDKLREAFGTVPTELDFLAPQNAGIMLMCTSRVIEAKYLDYCQKFTGVKVVPVGTPFQDPLTEDISDPELIRWLDTKPPNSVVYVSFGSEYFLSREDMEEVAFGLELSLVNFIWVARFPKGVEQNLEDVLPPGFLDRVRDRGRVLPHLVPQAHILSHKATGGFISHCGWNSVMESIDFGVPIIAMPMQWDQPINARLLVELGVAVEIVRQEDGRIPRDAIAQVLRDVISGPTGEKLRANCRDLAKRLRARRDVEMTIAALELIRLGRNRNAYK

SEQ ID NO: 745 - protein, 440 aa, Artificial Sequence
  engineered beta-1,2-glycosyltransferase encoded in plasmid pA32982
QSQRVLMFPWLALGHVNPFLRIAKQLADRGFVIYVVSTAINLELAKKRITNKYLPSIHLVTYALPELPELPSHLHTTNGLPPHLNGLLHKALKMSAPEFSKIIGNLKASLVLYDFLLPWAEKVALEQGIPAVPLLTSGAALFAYFFNHLTRPGHEFPFPAIRLSKREQDKTYEMFGTEPTELDFLAPANAGAMLMCTSRVIEAKYLDYCAKLTNVKVVPVGASFQDALYEDISDPELIRWLDTKPPNSVVYVSFGSEAFLSREDMEEVAFGLELSNVNFIWVARFPKGAEQTLIDVLPPGFLERVGDRGRVLDHLVPQAHVLNHKSTGGFISHCGWNSVMESIDFGVPIIAMPMQWDQPINARLLRELGVAVEISRDELGRIHRNEIAQVVKDVISGPTGEKLRANVRDIARRLRARREEEMNAAAEELMKLCRNRSAAN

SEQ ID NO: 746 - protein, 440 aa, Artificial Sequence
  engineered beta-1,2-glycosyltransferase encoded in plasmid pA32983
QTLRVLMFPWLALGHVNPFLRIAKQLADRGFVISLVSTAVVLESAKKRIPNKYSSSIQLVELSLPLLPELPSHYHTTNGLPPHLNMTLHKALKMSAPEVSKQLQNLKVDLVLYDFLQPWAEKVALEQGVPAVPLLTFGAALFAYFFNHLKRPGNEFPFPAISLSKREQDKLREMFGREPTEEDFLAPANAGYMLMCTSRVIEAKYLDYCQKLTNVKVVPVGPSFRDPRQEDIDDPELIRWLDTKPENSVVYVSFGSEAFLSREDMEEVAFGLELSNSNFIWVARFPKGREQHLEDVLPPGFLERVGDRGRVLDRLVPQAHILNHKSTGGFISHCGWNSVMESIDFGVPIIAMPMQWDQPINARLLRELGVAVEIRRREDGSIHRGEIAQVLKDVIQGPTGEKLRRNVRDIAKLLRASREVEMNIAAEALMRLCRNRSAFN

SEQ ID NO: 747 - protein, 440 aa, Artificial Sequence
  engineered beta-1,2-glycosyltransferase encoded in plasmid pA32984
QTQQVLMFPWLALGHVNPFLRIAKQLADRGFVIYLVNTAINLNLTKKRIPYKYSNSIHLVTSALPELPELPSHLWTTNGLPPHLNGTLRKALKLSAPEFSKQVQNLKPDLVLYDFLIPWAEKVALSQGVPGVPLLTSGAALFSYFFNFLKRLGHEFPFPEIRLSKREQDKMREAFGTEPTELDFLVPANAGIMLMCTSRVIEAKYLDYCQKLTNVKVVPVGAPFQDPLTEDIYDPELIRWLDTKPPHSVVYVSFGSEYFLSRRQMEEIAWGLELSGVNFIWVARFPKGEEANLEDVLPKGFLDRVGDRGRVLDHLVPQAHILSHKATGGFISHCGWNSVMESIDFGVPIIAMPMQWDQPINARLLVELGVAVEVRRDEDGRIHREEAAQVTRDVISGPTGEILRANVRDIALRLRARREEEMDAAAEELRALCRNRRALK

SEQ ID NO: 748 - protein, 440 aa, Artificial Sequence
  engineered beta-1,2-glycosyltransferase encoded in plasmid pA32985
QTLRVTMFPWLALGHVNPFLRLAKQLADRGFVIYLVSSAINLESLKHRIPEKYRNSIHLVELALPLLPELPSHLHTTNGLPPHLNGTLRKALKMSAGELSKILQNLNADLVLYDFLQPWAEKSALSQGVCAVPLLTSGAALFAYFWQFLDRPGHEFPFPAIRLSKREQDKMREAFGTEPTEEDFLAPGNAGAMLMCTSRVIEAKYLDYCQKFTNVKVVPVGTTFQDALFEDISDPELIRWLDTKPPNSVVYVSFGSEYFLSREDMEEIAFGLELSGVNFIWVARFPKGEEQNLEDVLPPGFSDRVRDRGRVLDHLVPQAHILNHPSTGGFISHCGWNSVMESIDFGVPIIAMPMQWDQPINARLLRELGVAVEVPRQEDGRIHRSEIAQVVKDVISGPTGQKLRANVADLARRLRARREEEMDAAAEELLQLCRHRAAYK

SEQ ID NO: 749 - protein, 440 aa, Artificial Sequence
  engineered beta-1,2-glycosyltransferase encoded in plasmid pA32987
QTLRVLMFPWLALGHVNPFLRIAKQLADRGFVIHLVSTAVVLESAKKRIPEKYSNSIHLVELALPLLPELPSHYHTTNGLPPHLNGTLRKALQMAAGNFSKILQNLRPDLVLADFLQPWAEKVALSQGIPAVPLLTSGAALFAYFFNFLKRLGHEFPFEAIRLSKRAQDKLREAMGTVPTELDFLAPQQAGIMLMCTSRVIEAKYLDYCQKFTGVKVVPVGTPFQDPLTEDISDPELIRWLDTKPPNSVVYVSFGSEAFLSREDMEEVAFGLELSLVNFIWVARFPKGREQNLEDVLPPGFLDRVRDRGRVRDHLVPQAHILSHKATGGFISHCGWNSVMEAIDFGVPIIAMPQQWDQPINARLLVELGVAVEIVRDEDGRIPRDAIAQVLRDVISGPTGEKLRANCRDLAKRLRARRDVEMTIAALELIRLGRNRNAYK

SEQ ID NO: 750 - protein, 440 aa, Artificial Sequence
  engineered beta-1,2-glycosyltransferase encoded in plasmid pA32988
PTLRVLMFPWLALGHVLPFLRIAKQLADRGFVIHLQSTSVVLESAKKRIPEKYSDSIHLVELALPLLPELPSHYHTTNGLPPHLNAVLRKALKMAAPNFSKILQNLRPDLVLYDFLQPWAEKVALSQGIPAVRLLTSGAALFSYFFNFLKRPGQEFPFEAIRLSKRAQDKMREAMATEPTELDFLAPQNAGIMLMCTSRVIEAKYLDYCQELTGVKVVPVGTPFQDPLTEDIDDPELIRWLDTKPPNSVVYVSFGSEAFLSREDMEEVAFGLELSLVNFIWVARFPKGREQNLIDVLPPGFLDRVRDRGRVRDGLVPQAHILSHKATGGFISHCGWNSVMEAIDFGVPIIAMPMQWDQPINARLLVELGVAVEIVRDEDGRIPRDAIAQVLRDVISGPTGEILRRKCRDLAKLLRAAREVEMTIAALELIRLGRNRNAYK

SEQ ID NO: 751 - protein, 440 aa, Artificial Sequence
  engineered beta-1,2-glycosyltransferase encoded in plasmid pA32989
QTLRVLMFPWLALGHVNPFLRIAKQLADRGFVIHLVSTAVNLESAKKRIPEKYSSSIQLVELALPLLPELPSHYHTTNGLPPHLNGTLRKALKMSAGNVSKILQNLRADLVLYDFLQPWAEKVALEQGVPAVPLLTSGAALFAYFKNFVKLPGNEFPFEAIRLSKREQDKLREMFGREPTELDFLSHQNAGAMLMCTSRVIEAKYLDYCQELTNVKVVPVGPSFQDPRPSDIDDPELTDWLDTKPENSVVYVSFGSEYFLSRRDMEEVAFGLELSNSNFIWVARFPKGEERHLEDVLPPGFLDRVGDRGRVLPHLVPQAHILNHKSTGGFISHCGWNSVMESIDFGVPIIAMPMQWDQPINARLLRELGVAVEIRRREDGSIPRDEIAQVIKDVIQGPTGEILRRNVRDLAKLLRARRDVEMNIAAEELMRLCRNRSAFN

SEQ ID NO: 752 - protein, 440 aa, Artificial Sequence
  engineered beta-1,2-glycosyltransferase encoded in plasmid pA32990
QTQQVLMFPWLALGHVNPFLRIAKQLADRGFIIYLVNTMINLELAKKRITNKYSNSIHLVTYSLPELPELPPHLHTTNGLPPHLNGTLHKALKMSRPTFSKQVQNLKPDLVLYDFLIPWAEKVALDQGVPGVPLLTFGAALFAYFFNHLKRPGNEFPFPAIRLSKRELDKLYEMFRTEPTELDFLVPANAAIMLMCTSRVIEAKYLDYCQKLTNVKVVPVGAPFRDPLTLDLYDPELIRWLDTKPPNSVVYVSFGSEYFLSREQMEEVAFGLELSGVNFIWVARFPKGEEQNLEDVLPKGFLERVGDRGRVLDHLVPQACILNHKSTGGFISHCGWNSVMESIDFGVPIIAMPMTWDQPINARLLVELGVAVEIRRDEDGRIHRDEIAQVLKDVINGATGEILRRNVRDIALRLRARREEEMTAAALELLALCRNLRALK

SEQ ID NO: 753 - protein, 440 aa, Artificial Sequence
  engineered beta-1,2-glycosyltransferase encoded in plasmid pA32991
QTLRVTMFPWLALGHVGPFLRIAKQLADRGFVIYLVNTNINLESLRHRITEKYFFSIHLVELALPHLPELPSHLHTTNGLPPHLNGTLHKALKMSAPELSKILQNLNADLVLYDFLQPWAEKSALSQGVGAVPLLTSGAALFAYFFNFLDRPGNEFPFPAIRLSKREQAKMREMFGKEPTEEDFLAPGNANAMLMCTSRVIEAKYLDYCQKLTNVKVVPVGATFQDATFEDLSDPELIRWLDTKPPNSVVYVSFGSEYFLSREQMEEIAFGLELSGVNFIWVARFPKGEEQNLEDVLPEGFSERVGDRGRVRDRLVPQASVLNHPSTGGFISHCGWNSVMESIDFGVPIIAMPMQWDQPINARLLRELGVAVEIPRDEDGRIHRNEIAQVLKDVIFGPLGEKLRRNVADIAKLLRARREEEMNAAAEELLQLCRHRAALK

SEQ ID NO: 754 - protein, 440 aa, Artificial Sequence
  engineered beta-1,2-glycosyltransferase encoded in plasmid pA32992
QTQQVLMFPWLALGHVNPFLRIAKQLADRGFTIYLVNTAINLNSTKKRIPEKYSNSIHLVESALPELPELPSHLWTTNGLPPHLNGTLRKALKLSRPNFSKIVQNLKADLVLYDFLIPWAEKVALDQGVPAVPLLTSGAALFSYFFNFNKRPGNEFPFPEIRLSKREQDKMREAFGKEPTELDFLVPANSGIMLMCTSRVIEAKYLDYCQELTNVKVVPVGAPFQDPLTLDLDDTELIRWLDTKPPHSVVYVSFGSEYFLSREQMEEIAFGLELSNVNFIWVARFPKGEEANLEDVLPKGFLDRAGDRGRVLDHLVPQAAILNHKATGGFISHCGWNSVMESIDFGVPIIAMPMQWDQPINARLLVELGVAVEVRRREDGRIHREEAAKVTRDVINGATGEILRRNVRDIALRLRRRREEEMDAAAEELRALCRNRRALK

SEQ ID NO: 755 - protein, 440 aa, Artificial Sequence
  engineered beta-1,2-glycosyltransferase encoded in plasmid pA32993
QTLRVLMFPWLALGHVNPFLRIAKQLADRGFVIHLVSSAVNLESARKRIPEKYSSSIQLVELALPELPELPSHYHTTNGLPPHLNGTLRKALKMAAGEFSKQLQNLKVDLVLYDFLQPWAEKRALEQGVPAVPLLTSGAALFAYFFNFVKLPGNEFPFEAIRLSKREQDKLREMFGREPTEEDFLAHFNAGAMLMCTSRVIEAKYLDYCTKLTGVKVVPVGPSFQDPLPEDIDDPELTRWLDTKPPNSVVYVSFGSEYFLSREDMEEVAFGLELSNSNFIWVARFPKGRERHLEDVLPPGFLDRVRDRGRVLPHLVPQAHILHHPSTGGFISHCGWNSVMESIDFGVPIIAMPMQWDQPINARLLRELGVAVEIRRQEDGRIPRDEIAQVIKDVIQGPTGQKLRANVRDLAKLLRASRDVEMNIAAEELMRLCRNRSAFN

SEQ ID NO: 756 - protein, 440 aa, Artificial Sequence
  engineered beta-1,2-glycosyltransferase encoded in plasmid pA32994
QTLRVLMFPWLALGHVGPFLRIAKQLADRGFVIHLVSTAVVLESAKKRIPNKYSSSIHLIELSLPLLPELPSHYHTTNGLPPHLNMTLRKALKMAAPNVSKTLQNLRPDLVLYDFLQPWAEKLALEQGIPAVPLLTFGAALFSYFKNFVKLPGNEFPFEAIRLSKREQDKMREMFGREPTEEDFLAHQNAGYMLMCTSRVIEAKYLDYCQELTNVQVVPVGPSFRDPLPEDIDDPELTDWLDTKPENSVVYVSFGSEAFLSREDMEEVAFGLELSNSNFIWVARFPKGREAHLEDVLPPGFLERVRDRGRVLDRLVPQAHILHHKSTGGFISHCGWNSVMEAIDFGVPIIAMPMQWDQPINARLLRELGVAVEIRRQEDGRIPRDEIAQVIKDVIQGPTGEILRRKVRDLAKLLRASREVEMNIAALALIKLCRNRSASN

SEQ ID NO: 757 - protein, 440 aa, Artificial Sequence
  engineered beta-1,2-glycosyltransferase encoded in plasmid pA32995
QTLRVAMFPWLALGHVNPFLRIAKQLADRGFVIYLVSTAVNLNSTKHRIPEKYSNLIHLVELALPLLPELPPYYWTTNALPPALNGTLHKALKLAAPEFSKQLSTINATLVLYDFLQPWAEKVALDQGICAVPLATFGAALFSYMFNFLKRPGHPFPFPEIRLSKREKDKMTEMLGTEPTEEDFLAPANAGIMLMCTSRVIEAKYLDYCQKLTGVKVVPVGPSFQDPLTEDIRDPELIDWLDTKPLNAVVYVSFGSEYFLSREQMEEVAFGLELSQVNFIWVARFPKGAEQLLIDVLPHGFLDRVGDRGRVLDHLVPQAHILSHPATGGFMSHCGWNSVMEAIDFGVPIIAMPQQWDQPINARLLVELGVAVEIVRREDGRIHREEAAQVLKDVMSGPTGEKLRANVADIGRRLRARRDEEMNAAAEELIKLGRNRLAYN

SEQ ID NO: 758 - protein, 440 aa, Artificial Sequence
  engineered beta-1,2-glycosyltransferase encoded in plasmid pA32996
QTLRVLMFPWLALGHVGPFLRIAKQLADRGFVIYLVSTAVVLESARKRIPNKYSSSIHLVELSLPLLPELPSHYHTTNGLPPHLNGTLRKALKMAAPEFSKTLQNLRADLVLYDFLQPWAEKRALEQGIPAVPLLTFGAALFAYFFNFVKLPGNEFLFPAIRLSKREQDKLREMFGREPTEEDFLAPANAGIMLMCTSRVIEAKYLDYCMKLTNVKVVPVGPSFQDPLPEDIDDPELTRWLDTKPENSVVYVSFGSESFLSRRDMEEVAFGLELSNSNFIWVARFPKGREAHLEDVLPPGFLERVRDRGRVLDHLVPQAHILHHKSTGGFISHCGWNSVMEAIDFGVPIIAMPQQWDQPINARLLRELGVAVEIRRREDGSIPREEIAQVIKDVIQGPTGEKLRRNVRDLAKLLRARRDVEMNIAAEALIRLCRNRSAFN

SEQ ID NO: 759 - protein, 440 aa, Artificial Sequence
  engineered beta-1,2-glycosyltransferase encoded in plasmid pA32997
QTLRVLMFPWLALGHVNPFLRIAKQLADRGHVIYLVSTAVNLESLKKRIPEKYLSSIHLVTLALPELPELPPRYHTTNGLPPHLNGVLRKALKMAAGGFSKVLSDLKADLVLVDFLQPWASRVALEQGIPSVGLLTSGAALFAYFFNFVKRPGNEFPFEAIRLSKREQDKLREAFGTEPTELDFLAPFSTGIMLMCTSRVIEAKYLDYCTKLTGVKVVPVGPPFQDPSTEDIDDPELIRWLDTKPTNSVVYVSFGSEYFLSREQMEEVAFSLELSNVNFIWVARFPKGREQTLEDVLPPGFLDRVRDRGRVLDHLVPQAHILHHPATGGFISHCGWNSVMESIDFGVPIIAMPMQWDQPINARLLRELGVAVEIRRDEDGRIPREEIAKVLKDVMSGPTGQKLRANCADLAKRLRAARELEMDAAALELILLGRKRLASK

SEQ ID NO: 760 - protein, 440 aa, Artificial Sequence
  engineered beta-1,2-glycosyltransferase encoded in plasmid pA32998
QTLTVAMFPWLALGHVNPFLRIAKDLADRGHVIYFVSTNVVLESAKKRIPNKYSSSIHLVTLALPELPELPPHYHTTNGLPPHLNGTLHKALQMSAPGLSKILQNLKADLVVVDFLQPWASSVALSQGIPSVGLLTSGAALFAYFFNFLKRPGNEFPFEAISLSKREQDKLREMFGTEPTELDFLAPASTKIMLMCTSRVIEAKYLDYCAKLTNVKVVPVGPTFQVPSTVDIDDPELIRWLDTKPPNSVVYVSFGSEYFLSREQMEEVAFSLELSNSNFIWVARFPKGREQTLEDVLPPGFLERVGDRGRVLDHLVPQAHILNHKSTGGFISHCGWNSVMESIDFGVPIIAMPMQWDQPINARLLRELGVAVEIRRREDGSIHRDEIAQVLKDVIFGPTGEKLRRNVADIAKRLRAARELEMNAAALELILLGRHRLASK

SEQ ID NO: 761 - protein, 440 aa, Artificial Sequence
  engineered beta-1,2-glycosyltransferase encoded in plasmid pA32999
PTLRVLMFPWLALGHVGPFLRIAKQLADRGFVIYLVSTAVVLESTKKRIPEKYSDSIHLVELALPLLPELPSHYHTTNGLPPHLNGVLRKALKMAAPEFSKILQNLRPDLVLYDALQPWAEKVALSQGIPAVPLLTSGAALFAYFFNFLKRLGQEFPFEAIRLSKRAQDKLREAMATVPTELDFLAPQNAKIMLMCTSRVIEAKYLDYCQKFTGVKVVPVGPPFQDPLTEDIDDPELIRWLDTKPPNSVVYVSFGSEAFLSRRDMEEVAFGLELSLVNFIWVARFPKGREQNLEDVLPPGFLDRVRDRGRVRDHLVPQAHILSHKATGGFISHCGWNSVMEAIDFGVPIIAMPQQWDQPINARLLVELGVAVEIVRREDGSIPRDEIAQVLRDVIHGPTGEKLRRNCRDLAKLLRLRRDVEMTIAAEELIRLGRHRNAYK

SEQ ID NO: 762 - protein, 440 aa, Artificial Sequence
  engineered beta-1,2-glycosyltransferase encoded in plasmid pA33000
QTLRVLMFPWLALGHVNPFLRIAKQLADRGFVIHLVSSAVVLESAKKRIPNKYSNSIHLVELALPLLPELPSHYHTTNGLPPHLNGTLRKALKMAAGEVSKQLQNLRVDLVLYDFLQPWAEKLALEQGVPAVPLLTFGAALFAYFFNHVKRPGHEFLFPAIRLSKREQDKLREMVGTEPTELDFLAPANAGYMLMCTSRVIEAKYLDYCQKLTNVKVVPVGPSFRDPLPEDIDDPELTRWLDTKPPNSVVYVSFGSESFLSREDMEEVAFGLELSNSNFIWVARFPKGRERHLEDVLPPGFLERVRDRGRVLPHLVPQAHILHHKSTGGFISHCGWNSVMEAIDFGVPIIAMPQQWDQPINARLLRELGVAVEIRRQEDGRIPRDEIAQVIKDVISGPTGQKLRANVRDLAKRLRARRDVEMNVAAEALMRLCRNRSAFN

SEQ ID NO: 763 - protein, 440 aa, Artificial Sequence
  engineered beta-1,2-glycosyltransferase encoded in plasmid pA33001
QTLRVAMFPWLALGHVNPFLRIAKQLADRGFVIYLVSTAVNLNSTAKRIPEKYSDLIHLVELTLPLLPELPPYYWTTNGLPPHLNGTLHKALKLARPEFSKQLSTINATLVVYDFLQPWAEKVALSQGICAVPLATSGAALFSYFFNFLKRPGHPFPFPEIRLSKNEQDKMREMFGTEPTEEDFLAPANAKIMLMCTSRVIEAKYLDYCQKLTGVKVVPVGPSFQDPVTEDIRDPELIRWLDTKPLNAVVYVSFGSEYFLSREQMEEVAFGLELSQVNFIWVARFPKGAEQLLIDVLPHGFLDRVGDRGRVLDHLVPQAHILSHPATGGFMSHCGWNSVMESIDFGVPIIAMPMQWDQPINARLLVELGVAVEIVRREDGRIHREEAAKCLKDVMGGPTGEKLRANVADIGRRLRARRDEEMNAAAEELIKLGRNHLAYN

SEQ ID NO: 764 - protein, 440 aa, Artificial Sequence
  engineered beta-1,2-glycosyltransferase encoded in plasmid pA33002
PTLRVLMFPWLALGHVNPFLRIAKQLADRGFVIHLQSTSVVLESTAKRIPEKYSDSIHLVELALPLLPELPSHYHTTNGLPPHLNGTLRKALQMAAGNFSKILQNLRPDLVLVDFLQPWAEKVALEQGIPGVRLLTSGAALFAYFFNFLKRLGQEFPFPEISLSKRAQDKLREAFGTVPTELDFLAPQSAKIMLMCTSRVIEAKYLDYCQKFTGVKVVPVGTPFQDPLTRDISDPELIRWLDTKPPNSVVYVSFGSEYFLSREDMEEVAFGLELSNVNFIWVARFPKGREQNLEDVLPPGFLDRVRDRGRVLPHLVPQAHILSHKATGGFISHCGWNSVMESIDFGVPIIAMPMQWDQPINARLLVELGVAVEIVRDEDGRIPREAIAKVLKDVISGPTGEKLRRNCRDLAKLLRAAREVEMTIAALELIRLGRHRNAYK

SEQ ID NO: 765 - protein, 440 aa, Artificial Sequence
  engineered beta-1,2-glycosyltransferase encoded in plasmid pA33004
QSQRVLMFPWLALGHVNPFLRIAKQLADRGFVIYVVSTAINLNLIKKRIPNKYLNSIHLVTSALPELPELPSRLHTTNGLPPHLNGLLRRALKMAAPEFSKIISNLKASLVLYDFLLPWAEKVALEQGIPAVPLLTSGAALFAYFWNFLTRPGHEFPFPAIRLSKRELDKMREAFGTEPTELDFLAPANAGAMLMCTSRVIEAKYLDYCAKFTNVQVVPVGTSYQDPLYEDISDPELIRWLDTKPPHSVVYVSFGSEYFLSREDMEEVAFGLELSNVPFIWVARFPKGAEQTLIDVLPPGFLDRVGDRGRVLTHLVPQAHILSHKSTGGFISHCGWNSVMESIDFGVPIIAMPMQWDQPINARLLRELGVAVEVSRDELGRIHRSEIAQVIRDVISGPTGEKLRANSRDFARRLRARREEEMNAAAEELRRLCRNRSAAN

SEQ ID NO: 766 - protein, 440 aa, Artificial Sequence
  engineered beta-1,2-glycosyltransferase encoded in plasmid pA33005
QTLQVTMFPWLGLGHVNPFLRIAKQLADRGMVIYVVSTAVNLEMAKKRIPEKYSNSIHLVTSRLPELPELPSHYHTTNGLPPHLNKTLHKALKMSAPNFSKILQNINATLVLYDFLVPWAEKSALEQGIPAVPLLTSGAALFAYFFNFLTRPGEEFPFEAIRLSKREQDKMREAFGTEPPDEDFLAPAQAGIMLMCTSRVIEAKYLDYCTKLTNVKVVPVGPPFQDPLTEDIDDPELMRWLDTKPPHSVVYVSFGSEAFLSREDLEEVAFGLELSGVNFIWVARFPKGEEARLEDVLPRGFLERVGDRGRVLDHLVPQAHILSHPSTGGFISHCGWNSVMESIDFGVPIIAMPMQWDQPINARLLVELGVAVEIPRREDGRVHRAEIARVLKDVISGPTGEKLRANVADISARLRARREEEMNAAAEALLQLHRNRNAYV

SEQ ID NO: 767 - protein, 440 aa, Artificial Sequence
  engineered beta-1,2-glycosyltransferase encoded in plasmid pA33006
QTLQVTMFPWLGLGHVNPFLRIAKQLADRGMVIYVVSTAVNLEMAKKRIPEKYSNSIHLVESRLPELPELPSHYHTTNGLPPHLNKTLHKALKMSAPNFSKILQNINPTLVLYDFLVPWAEKSALEQGIPAVPLLTSGAALFAYFFNFLTRPGEEFPFEAIRLSKREQDKMREAFGTEPPDEDFLAPAQAGIMLMCTSRVIEAKYLDYCTKLTNVKVVPVGPPFQDPLTEDIDDPELMRWLDTKPEHSVVYVSFGSEAFLSREDLEEVAFGLELSGVNFIWVARFPKGEEARLEDVLPRGFLERVGDRGRVLDHLVPQAHILSHPSTGGFISHCGWNSVMESIDFGVPIIAMPMQWDQPINARLLVELGVAVEIPRREDGRVHRAEIARVLKDVISGPTGEKLRANVADISARLRARREEEMNAAAEALLQLHRNRNAYV

SEQ ID NO: 768 - protein, 440 aa, Artificial Sequence
  engineered beta-1,2-glycosyltransferase encoded in plasmid pA33007
QTLQVTMFPWLGLGHVNPFLRIAKQLADRGMVIYVVSTAVNLEMAKKRIPEKYSNSIHLVTLRLPELPELPSHLHTTNGLPPHLNKTLHKALKMSAPNFSKILQNINATLVLYDFLVPWAEKVALSQGVPAVPLLTSGAALFAYFFNFLTRPGEEFPFEAIRLSKREQDKMREMFGTEPPEEDFLAPAQAGIMLMCTSRVIEAKYLDYCQKLTNVKVVPVGAPFQDPLTEDIDDPELMRWLDTKPPHSVVYVSFGSEAFLSREDMEEVAFGLELSGVNFIWVARFPKGEEQRLEDVLPRGFLERVGDRGRVLDHLVPQAHILNHPSTGGFISHCGWNSVMESIDFGVPIIAMPMQWDQPINARLLVELGVAVEIPRREDGRVHRAEIARVLKDVISGPTGEKLRANVADIAARLRARREEEMNAAAEALLQLHRKRLAYV

SEQ ID NO: 769 - protein, 440 aa, Artificial Sequence
  engineered beta-1,2-glycosyltransferase encoded in plasmid pA33008
QTLQVTMFPWLGLGHVNPFLRIAKQLADRGMVIYVVSTAVNLEMAKKRIPEKYSNSIHLVELRLPELPELPSHLHTTNGLPPHLNKTLHKALKMSAPNFSKILQNINPTLVLYDFLVPWAEKVALSQGVPAVPLLTSGAALFAYFFNFLTRPGEEFPFEAIRLSKREQDKMREMFGTEPPEEDFLAPAQAGIMLMCTSRVIEAKYLDYCQKLTNVKVVPVGAPFQDPLTEDIDDPELMRWLDTKPEHSVVYVSFGSEAFLSREDMEEVAFGLELSGVNFIWVARFPKGEEQRLEDVLPRGFLERVGDRGRVLDHLVPQAHILNHPSTGGFISHCGWNSVMESIDFGVPIIAMPMQWDQPINARLLVELGVAVEIPRREDGRVHRAEIARVLKDVISGPTGEKLRANVADIAARLRARREEEMNAAAEALLQLHRKRLAYV

SEQ ID NO: 770 - protein, 440 aa, Artificial Sequence
  engineered beta-1,2-glycosyltransferase encoded in plasmid pA33009
QTLQVTMFPWLGLGHVNPFLRIAKQLADRGMVIYVVSTAVNLEMAKKRIPEKYSNSIHLVELRLPELPELPSHYHTTNGLPPHLNKTLHKALKMSAPNFSKILQNINPTLVLYDFLVPWAEKVALSQGVPAVPLLTSGAALFAYFFNFLTRPGEEFPFEAIRLSKREQDKMREMFGTEPPEEDFLAPAQAGIMLMCTSRVIEAKYLDYCQKLTNVKVVPVGPPFQDPLTEDIDDPELMRWLDTKPEHSVVYVSFGSEAFLSREDMEEVAFGLELSGVNFIWVARFPKGEEQRLEDVLPRGFLERVGDRGRVLDHLVPQAHILNHPSTGGFISHCGWNSVMESIDFGVPIIAMPMQWDQPINARLLVELGVAVEIPRREDGRVHRAEIARVLKDVISGPTGEKLRANVADIAARLRARREEEMNAAAEALLQLHRKRNAYV

SEQ ID NO: 771 - protein, 440 aa, Artificial Sequence
  engineered beta-1,2-glycosyltransferase encoded in plasmid pA33010
QTQQVTMFPWLGLGHVNPFLRIAKQLADRGFVIYVVSTAVNLEMAKKRIPEKYANSIHLVTYRLPLLPELPSHLHTTNGLPPHLNKTLHKALKMSAPNFSKILQNINADLVLYDFLVPWAEKVALSQGIPAVPLLTSGAALFAYFFNFLKRPGEEFPFEAIRLSKREQDKHREMFGTEPPEEDFLAPAQAGIMLMCTSRVIEAKYLDYCAKLTNVKVVPVGAPFQDALTEDIDDPELMDWLDTKPPHSVVYVSFGSEAFLSREDMEEVAFGLELSGSNFIWVARFPKGAEQRLEDVLPPGFLERVGDRGRVLDHLVPQAHILNHPSTGGFISHCGWNSVMESIDFGVPIIAMPMQWDQPINARLLVELGVAVEIPRDEDGRVHRAEIARVLKDVISGPTGEKLRANVADIAARLRARREPEMGAAAEELIKLGRNRNAYK

SEQ ID NO: 772 - protein, 440 aa, Artificial Sequence
  engineered beta-1,2-glycosyltransferase encoded in plasmid pA33011
QTQQVTMFPWLGLGHVNPFLRIAKQLADRGFVIYVVSTAVNLEMAKKRIPEKYANSIHLVEYRLPLLPELPSHLHTTNGLPPHLNKTLHKALKMSAPNFSKILQNINPDLVLYDFLVPWAEKVALSQGIPAVPLLTSGAALFAYFFNFLKRPGEEFPFEAIRLSKREQDKHREMFGTEPPEEDFLAPAQAGIMLMCTSRVIEAKYLDYCAKLTNVKVVPVGAPFQDALTEDIDDPELMDWLDTKPEHSVVYVSFGSEAFLSREDMEEVAFGLELSGSNFIWVARFPKGAEQRLEDVLPPGFLERVGDRGRVLDHLVPQAHILNHPSTGGFISHCGWNSVMESIDFGVPIIAMPMQWDQPINARLLVELGVAVEIPRDEDGRVHRAEIARVLKDVISGPTGEKLRANVADIAARLRARREPEMGAAAEELIKLGRNRNAYK

SEQ ID NO: 773 - protein, 440 aa, Artificial Sequence
  engineered beta-1,2-glycosyltransferase encoded in plasmid pA33012
QTQQVTMFPWLGLGHVNPFLRIAKQLADRGFVIYVVSTAVNLEMAKKRIPEKYANSIHLVEYRLPLLPELPSHYHTTNGLPPHLNKTLHKALKMSAPNFSKILQNINPDLVLYDFLVPWAEKVALSQGIPAVPLLTSGAALFAYFFNFLKRPGEEFPFEAIRLSKREQDKHREMFGTEPPEEDFLAPAQAGIMLMCTSRVIEAKYLDYCAKLTNVKVVPVGPPFQDALTEDIDDPELMDWLDTKPEHSVVYVSFGSEAFLSREDMEEVAFGLELSGSNFIWVARFPKGAEQRLEDVLPKGFLERVGDRGRVLDHLVPQAHILNHPSTGGFISHCGWNSVMESIDFGVPIIAMPMQWDQPINARLLVELGVAVEIPRDEDGRVHRAEIARVLKDVISGPTGEKLRANVADIAARLRARREEEMGAAAEELIKLCRNRNAYK

SEQ ID NO: 774 - protein, 440 aa, Artificial Sequence
  engineered beta-1,2-glycosyltransferase encoded in plasmid pA33014
QTLRVTMFPWLGLGHVNPFLRIARQMADRGFVIHLVSTAVQLEMLKKRIPEKYSNSIHLVELRLPLLPELPPHYHTTNGLPPHLNKTLHKALQMSAPEFSKILQDINPALVLYDFLVPWAEKVALSQGIPAVPLLTSGAALFAYFFNFLKRPGEEFPFEAIRLSKREKDKHREMFGTEPPELDFLAPAQAGIMLMCTSRVIEAKYLDYCAELTNVKVVPVGPPFQTPLTEDISDPELMDWLDTKPEHSVVYVSFGSEAFLSREDMEEVAFGLELSGSNFIWVARFPKGEEQRLEDVLPSGFLERVGDRGRVLDHLVPQAHILNHPSTGGFISHCGWNSVMESIDFGVPIIAMPMQWDQPINARLLRELGVAVEIPRDEDGRVHRAEIARVLKDVISGPTGEKLRANVRDIAARLRARREEEMNIAALELLQLCRNRNATK

SEQ ID NO: 775 - protein, 440 aa, Artificial Sequence
  engineered beta-1,2-glycosyltransferase encoded in plasmid pA33015
QTLQVTMFPWLGLGHVNPFLRIAKQLADRGFVIYVVSTAVNLEMAKKRIPEKYSNSIHLVTLRLPELPELPSHLHTTNGLPPHLNKTLHKALKMSAPNFSKILQNINATLVLYDFLVPWAEKSALSQGVPAVPLLTSGAALFAYFFNHLTRPGEEFPFEAIRLSKREQDKLYEMFGTEPPEEDFLAPAQAGIMLMCTSRVIEAKYLDYCQKLTNVKVVPVGAPFQDPLTEDIDDPELMRWLDTKPPHSVVYVSFGSEAFLSREDMEEVAFGLELSGVNFIWVARFPKGEEQRLEDVLPRGFLERVGDRGRVRDHLVPQAHILNHPSTGGFISHCGWNSVMESIDFGVPIIAMPMQWDQPINARLLVELGVAVEIPRREDGRVHRAEIARVLKDVISGPTGEKLRANVADIAARLRARREEEMNAAAEALLQLCRKRLAYV

SEQ ID NO: 776 - protein, 440 aa, Artificial Sequence
  engineered beta-1,2-glycosyltransferase encoded in plasmid pA33016
QTLQVTMFPWLGLGHVNPFLRIAKQLADRGFVIYVVSTAVNLEMAKKRIPEKYSNSIHLVELRLPELPELPSHLHTTNGLPPHLNKTLHKALKMSAPNFSKILQNINPTLVLYDFLVPWAEKSALSQGVPAVPLLTSGAALFAYFFNHLTRPGEEFPFEAIRLSKREQDKLYEMFGTEPPEEDFLAPAQAGIMLMCTSRVIEAKYLDYCQKLTNVKVVPVGPPFQDPLTEDIDDPELMRWLDTKPEHSVVYVSFGSEAFLSREDMEEVAFGLELSGVNFIWVARFPKGEEQRLEDVLPRGFLERVGDRGRVRDHLVPQAHILNHPSTGGFISHCGWNSVMESIDFGVPIIAMPMQWDQPINARLLVELGVAVEIPRREDGRVHRAEIARVLKDVISGPTGEKLRANVADIAARLRARREEEMNAAAEALLQLCRKRLAYV

SEQ ID NO: 777 - protein, 440 aa, Artificial Sequence
  engineered beta-1,2-glycosyltransferase encoded in plasmid pA33017
QTLRVTMFPWLGLGHVNPFLRIAKQLADRGFVIYLVSTAVNLEMIKGRIPEKYSNSIHLVELRLPELPELPPHYHTTNGLPPHLNKTLHKALKMSAPEVSKQLQNINPALVLVDFLVPWASKLALEQGIGAVPLLTSGAALFAYFFNFLKRPGEEFPFEAIRLSKREQDKLREMFGTEPPEEDFLAPAQAGITLMCTSRVIEAKYLDYCMKLTNVKVVPVGPPFQDALYEDIRDPELMDWLDTKPTHSVVYVSFGSEAFLSREDMEEVAFGLELSGVNFIWVARFPKGEEQRLEDVLPKGFLERVGDRGRVLDHLVPQAHILNHKSTGGFMSHCGWNSVMESIDFGVPIIAMPMQWDQPINARLLRELGVAVEIPRDELGRVHRAEIARVLKDVISGPTGEKLRANVRDIAARLRARREVEMNAAALELLKLGRNRSAKN

SEQ ID NO: 778 - protein, 440 aa, Artificial Sequence
  engineered beta-1,2-glycosyltransferase encoded in plasmid pA33018
QTLRVTMFPWLGLGHVNPFLRIAKQLADRGFVIYLVSTAVNLEMIKGRIPEKYSNSIHLVELRLPELPELPPHYHTTNGLPPHLNKTLHKALKMSAPEVSKQLQNINPALVLVDFLVPWASKLALEQGIPAVPLLTSGAALFAYFFNFLKRPGEEFPFEAIRLSKREQDKLREMFGTEPPEEDFLAPAQAGITLMCTSRVIEAKYLDYCMKLTNVKVVPVGPPFQDPLYEDIRDPELMDWLDTKPTHSVVYVSFGSEAFLSREDMEEVAFGLELSGVNFIWVARFPKGEEQRLEDVLPKGFLERVGDRGRVLDHLVPQAHILNHPSTGGFMSHCGWNSVMESIDFGVPIIAMPMQWDQPINARLLRELGVAVEIPRDELGRVHRAEIARVLKDVISGPTGEKLRANVRDIAARLRARREVEMNAAALELLKLGRNRSAKN

SEQ ID NO: 779 - protein, 440 aa, Artificial Sequence
  engineered beta-1,2-glycosyltransferase encoded in plasmid pA33019
QSLRVTMFPWLGLGHVNPFLRIARQMADRGMVIHLVSTAVQLEMLKKRIPEKYSNSIHLVELRLPLLPELPPHLHTTNGLPPHLNKTLHKALKMSAPEFSKILQDINPALVLYDFLVPWAEKVALSQGIPAVPLLTSGAALFAYFFNHLKRPGEEFPFEAIRLSKREKDKHREMFGTEPPELDFLAPAQAGIMLMCTSRVIEAKYLDYCAELTNVKVVPVGPPFQTALTEDISDPELMDWLDTKPPHSVVYVSFGSEAFLSREDMEEVAFGLELSGSNFIWVARFPKGEEQRLEDVLPSGFLERVGDRGRVLDHLVPQAHILNHKSTGGFISHCGWNSVMESIDFGVPIIAMPMQWDQPINARLLRELGVAVEIPRDEDGRVHRAEIARVLKDVISGPTGEKLRANVRDIAARLRARREEEMNIAAEELLRLCRNRNATK

SEQ ID NO: 780 - protein, 440 aa, Artificial Sequence
  engineered beta-1,2-glycosyltransferase encoded in plasmid pA33020
QSLRVTMFPWLGLGHVNPFLRIARQMADRGMVIHLVSTAVQLEMLKKRIPEKYSNSIHLVELRLPLLPELPPHLHTTNGLPPHLNKTLHKALKMSAPEFSKILQDINPALVLYDFLVPWAEKVALSQGIPAVPLLTSGAALFAYFFNHLKRPGEEFPFEAIRLSKREKDKHREMFGTEPPELDFLAPAQAGIMLMCTSRVIEAKYLDYCAELTNVKVVPVGPPFQTPLTEDISDPELMDWLDTKPEHSVVYVSFGSEAFLSREDMEEVAFGLELSGSNFIWVARFPKGEEQRLEDVLPSGFLERVGDRGRVLDHLVPQAHILNHPSTGGFISHCGWNSVMESIDFGVPIIAMPMQWDQPINARLLRELGVAVEIPRDEDGRVHRAEIARVLKDVISGPTGEKLRANVRDIAARLRARREEEMNIAAEELLRLCRNRNATK

SEQ ID NO: 781 - protein, 440 aa, Artificial Sequence
  engineered beta-1,2-glycosyltransferase encoded in plasmid pA33021
QTLRVTMFPWLGLGHVNPFLRIAKQMADRGFVIYVVSTAVNLEMIKKRIPEKYRNSIHLVTLRLPELPELPPHLHTTNGLPPHLNKTLHKALQMSAPELSKQLQNIKATLVLYDFLVPWAEKVALSQGIPAVPLLTSGAALFAYFFEFLKRPGEEFPFEAIRLSKRELDKHREMFGTEPPELDFLAPAQAGAMLMCTSRVIEAKYLDYLAKLTNVKVVPVGAPFQTALTEDIDDPELMRWLDTKPPHSVVYVSFGSEAFLSREQMEEVAFGLELSGLNFIWVARFPKGLEQRLEDVLPHGFSERVGDRGRVLDHLVPQAHILNHKSTGGFISHCGWNSVMESIDFGVPIIAMPMQWDQPINARLLVELGVAVEIPRDEDGRVHRAEIARVLKDVISGPTGEKLRANVRDIAARLRARRELEMNAAAEELLQLCRNRLAYK

SEQ ID NO: 782 - protein, 440 aa, Artificial Sequence
  engineered beta-1,2-glycosyltransferase encoded in plasmid pA33023
QTLRVTMFPWLGLGHVNPFLRIAKQLADRGHVIYLVSTAVNLEMAKKRIPEKYSNSIHLVELRLPELPELPPHYHTTNGLPPHLNKTLHKALKMSAPEFSKQSQNISSSLVLYDFLVPWAEKVALDRGIPQVPLLTSGAALFAYFFNFLKRPGEEFPFEAIRLSKREQDKTREMFGTEPPEEDFLAPAQAGIMLMCTSRVIEAKYLDYCAKLTNVKVVPVGPSFQDPLTEDIDDPELMRWLDTKPTHAVVYVSFGSEAFLSREQMEEIAFGLELSGMNFIWVARFPKGEEQRLEDVLPRGFTERVGDRGRVLDHLVPQAHILNHPSTGGFLSHCGWNSVMESIDFGVPIIAMPMQWDQPINARLLVELGVAVEIPRREFGRVHRAEIARVLKDVISGPTGERLRANVADIAARLRARREEEMNAAAVALMALCRNRSAKV

SEQ ID NO: 783 - protein, 440 aa, Artificial Sequence
  engineered beta-1,2-glycosyltransferase encoded in plasmid pA33024
QTQQVTMFPWLGLGHVNPFLRIAKQLADRGFVIYVVSSAVNLNMTKKRIPEKYANSIHLVTSRLPLLPELPSRYHTTNGLPPHLNKTLHRALKMSAPNFSKILENINADLVLYDFLVPWAEKVALEQGIPAVPLLTSGAALFAYFFEFLKRPGEEFLFEAIRLSKREQDKHREAFGTEPPEEDFLAPAQAGIMLMCTSRVIEAKYLDYCTKLTNVKVVPVGPPFQDPLTEDIDDPELMDWLDTKPPHSVVYVSFGSEAFLSREDMEEVAFGLVLSGSNFIWVARFPKGAERRLEDVLPPGFLDRVGDRGRVLDHLVPQAHILNHPSTGGFISHCGWNSVMESIDFGVPIIAMPMQWDQPINARLLVELGVAVEIPRDEDGRVHRAEIARVLKDVMSGPTGQKLRANVADISARLRARREEEMGAAAEELRKLGRNRNAYK

SEQ ID NO: 784 - protein, 440 aa, Artificial Sequence
  engineered beta-1,2-glycosyltransferase encoded in plasmid pA33025
QTQQVTMFPWLGLGHVNPFLRIARQLADRGFVIYVVSTAVNLEMAKKRITEKYANSIHLVTYRLPLLPELPSHLHTTNGLPPHLNKTLHKALKMSAPNFSKILQNINADLVLYDFLVPWAEKVALSQGIPAVPLLTSGAALFAYFFNHLKRPGEEFPFEAIRLSKREQDKHREMFGTEPPEEDFLAPAQAGIMLMCTSRVIEAKYLDYCQKLTNVKVVPVGAPFRDALTEDIDDPELMDWLDTKPPHSVVYVSFGSEAFLSREDMEEVAFGLELSGSNFIWVARFPKGAEQRLEDVLPPGFLERVGDRGRVLDHLVPQAHVLNHPSTGGFISHCGWNSVMESIDFGVPIIAMPMQWDQPINARLLVELGVAVEIPRDEDGRVHRAEIARVLKDVISGPTGEKLRANVADIAARLRARREPEMGAAAEELMKLGRNRSAYK

SEQ ID NO: 785 - protein, 440 aa, Artificial Sequence
  engineered beta-1,2-glycosyltransferase encoded in plasmid pA33027
QTLQVTMFPWLGLGHVNPFLRLAKQLADRGFVIYVVSTAVNLEMAKKRIPEKYSNSIHLVTSRLPELPELPSHLHTTNGLPPHLNKTLHKALKMSAPNFSKILQNINATLVLYDFLVPWAEKSALSQGVPAVPLLTSGAALFAYFFNFLTRPGEEFPFEAIRLSKREQDKMREAFGTEPPDEDFLAPAQAGIMLMCTSRVIEAKYLDYCQKLTNVKVVPVGTPFQDPLTEDIDDPELMRWLDTKPPHSVVYVSFGSEAFLSREDLEEVAFGLELSGVNFIWVARFPKGEEARLEDVLPRGFLERVGDRGRVLDHLVPQAHILSHPSTGGFISHCGWNSVMESIDFGVPIIAMPMQWDQPINARLLVELGVAVEIPRREDGRVHRAEIARVLKDVISGPTGEKLRANVADLAARLRARREEEMNAAAEALLQLCRKRLAYV

SEQ ID NO: 786 - protein, 440 aa, Artificial Sequence
  engineered beta-1,2-glycosyltransferase encoded in plasmid pA33028
QTLRVTMFPWLGLGHVNPFLRIARQMADRGFVIHLVSSAVNLEMLKKRIPEKYSNLIHLVELRLPLLPELPPHYHTTNGLPPHLNKTLRRALKMAAGEFSKISSDINPALVLYDFLVPWAEKRALEQGIPAVPLLTSGAALFAYFFNFVKRPGEEFPFEAIRLSKREQDKHREMFGTEPPELDFLAPAQAGIMLMCTSRVIEAKYLDYCTELTNVKVVPVGPPYQDPLYEDIDDPELMDWLDTKPPHSVVYVSFGSEAFLSREDMEEVAFGLELSGSNFIWVARFPKGEEQRLEDVLPSGFLDRVGDRGRVLDHLVPQAHILSHKSTGGFISHCGWNSVMESIDFGVPIIAMPMQWDQPINARLLRELGVAVEIPRDEDGRVHRAEIARVLKDVISGPTGQKLRANSADISARLRARREEEMNAAALELLQLCRNRNATK

SEQ ID NO: 787 - protein, 440 aa, Artificial Sequence
  engineered beta-1,2-glycosyltransferase encoded in plasmid pA33029
QTLRVTMFPWLGLGHVNPFLRLAKQLADRGFVIYLVSTAVNLNMIKGRIPEAYSNLIHLVELRLPELPELPPHYHTTNGLPPHLNKTLRKALKLSAPEVSKVLQNINPALVLYDFLVPWASKLALEQGIGAVPLLTSGAALFAYFFNFLKRPGEEFLFEAIRLSKREQDKLREAFGTEPPEEDFLAPAQAGIMLMCTSRVIEAKYLDYCTKLTNVKVVPVGPPFQVPLTEDIDDPELMDWLDTKPTHSVVYVSFGSEAFLSREDMEEVAFGLELSGVNFIWVARFPKGEEQRLEDVLPNGFLERVGDRGRVLDHLVPQAHILHHKSTGGFMSHCGWNSVMESIDFGVPIIAMPMQWDQPINARLLRELGVAVEIPRDELGRVHRAEIARVLKDVISGPTGQKLRANSRDISARLRARRDEEMDAAAEELRKLGRNRNAFN

SEQ ID NO: 788 - protein, 440 aa, Artificial Sequence
  engineered beta-1,2-glycosyltransferase encoded in plasmid pA33030
QTLRVTMFPWLGLGHVNPFLRIAKQMADRGFVIYVVSTAVNLEMIKKRITEKYRNSIHLVTLRLPELPELPPHLHTTNGLPPHLNKTLHKALQMSAPELSKQLQNIKATLVLYDFLVPWAEKVALDQGIPAVPLLTSGAALFAYFFNHLKRPGEEFPFEAIRLSKRELDKMYEMFGTEPPELDFLAPAQAGAMLMCTSRVIEAKYLDYLAKLTNVKVVPVGAPFQTALTEDIDDPELMRWLDTKPPHSVVYVSFGSEAFLSREQMEEVAFGLELSGLNFIWVARFPKGLEQRLEDVLPHGFSERVGDRGRVLDHLVPQAHVLNHKSTGGFISHCGWNSVMESIDFGVPIIAMPMQWDQPINARLLVELGVAVEIPRDEDGRVHRAEIARVLKDVISGPTGEKLRANVRDIAARLRARRELEMNAAAEELLQLCRNRLAYK

SEQ ID NO: 789 - protein, 440 aa, Artificial Sequence
  engineered beta-1,2-glycosyltransferase encoded in plasmid pA33031
QTQTVTMFPWLGLGHVNPFLRIAKQLADRGFVIHVVSTAVNLEMAKKRIPEKYQNSIHLVTLRLPELPELPSHLHTTNGLPPHLNKTLHKALKMSAPTLSKILQNINAALVLYDFLVPWAEKVALEQGVPAVPLLTSGAALFAYFFNFLKRPGEEFPFEAIRLSKRELDKLREMFGTEPPEEDFLAPAQAGAMLMCTSRVIEAKYLDYLAKLTNVKVVPVGAPFQTALTEDIYDPELMRWLDTKPPHSVVYVSFGSEAFLSREDMEEVAFGLELSGVNFIWVARFPKGLEQRLEDVLPPGFLERVGDRGRVLDHLVPQAHILNHPSTGGFISHCGWNSVMESIDFGVPIIAMPMQWDQPINARLLRELGVAVEIPRDEDGRVHRAEIARVLKDVISGPTGEKLRANVRDIAARLRARREVEMNAAAEELMRLCRNRLAAN

SEQ ID NO: 790 - protein, 440 aa, Artificial Sequence
  engineered beta-1,2-glycosyltransferase encoded in plasmid pA33032
QTLRVTMFPWLGLGHVNPFLRIAKQLADRGHVIHLVSTAVNLEMAKKRITEKYSNSIHLVELRLPELPELPPHYHTTNGLPPHLNKTLHKALKMSAPEFSKQLRNINSSLVLYDFLVPWAEKRALDQGIPQVPLLTSGAALFAYFFNFLKRPGEEFPFEAIRLSKREQDKTREMFGTESPEEDFLAPAQAGIMLMCTSRVIEAKYLDYCAKLTNVKVVPVGPSFQDPLTEDIDDPELMRWLDTKPTHAVVYVSFGSEAFLSREQMEEIAFGLELSGMNFIWVARFPKGEEQRLEDVLPRGFTERVGDRGRVLDHLVPQAHILNHKSTGGFLSHCGWNSVMESIDFGVPIIAMPMQWDQPINARLLVELGVAVEIPRDEDGRVHRAEIARVLKDVISGPTGERLRANVADIAARLRARREEEMNAAAVALMALCRNRSAKV

SEQ ID NO: 791 - protein, 440 aa, Artificial Sequence
  engineered beta-1,2-glycosyltransferase encoded in plasmid pA33033
QTLQVTMFPWLGLGHVNPFLRIAKQLADRGFVIYLVSTAINLNMIKKRIPEKYSNLIHLIEVRMPELPELPPHYHTTNGLPPHLNKVLRKALKMSAPEFSKILSTINATLVLYDFLVPWASKVALERGIPQVPLLTSGAALFAYFVNFVKRLGEEFLFEAIRLSKREQDKLREMFGTVPPEEDFLAPAQAGIMLMCTSRVIEAKYLDYLTKLTNVKVVPVGPPFQDPLTEDIDDPELMRWLDTKPTHAVVYVSFGSEAFLSREDMEEIAFGLELSGVNFIWVARFPKGEERRLEDVLPTGFLERVGDRGRVLDHLVPQAHILSHPSTGGFISHCGWNSVMESIDFGVPIIAMPMQWDQPINARLLVELGVCVEIPRDEDGRVPRAEIARVLRDVISGPLREILRANVADISARLRARREEEMNAAAEELIKLCRNRNALK

SEQ ID NO: 792 - protein, 440 aa, Artificial Sequence
  engineered beta-1,2-glycosyltransferase encoded in plasmid pA33035
QTQTVTMFPWLGLGHVNPFLRIAKQLADRGFVTHLVSTAVVLEMAKKRIPNKYSNSIHLVELRLPELPELPSHYHTTNGLPPHLNKTLHKALQMSAPELSKILGTIKITLVLYDFLVPWAEKLALSQGIPAVPLLTSGAALFAYFFNFLTRPGEEFPFEAIRLSKREKDKMREMFGTEPPELDFLAPAQAGITLMCTSRVIEAKYLDYCSKLTNVKVVPVGPSFQDPLTEDIDDPELMRWLDTKPPHSVVYVSFGSEAFLSREQMEEIAFSLELSGVNFIWVARFPKGEEQRLEDVLPPGFLERVGDRGRVLDHLVPQAHILNHKSTGGFMSHCGWNSVMESIDFGVPIIAMPMQWDQPINARLLVELGVAVEIPRQEDGRVHRAEIARVLKDVISGPLGEKLRANVADIAARLRARRELEMTAAAETLIRLGRNRNASN

SEQ ID NO: 793 - protein, 440 aa, Artificial Sequence
  engineered beta-1,2-glycosyltransferase encoded in plasmid pA33036
QTQQVTMFPWLGLGHVNPFLRIAKQLADRGFVIYVVSSAVNLNMTKKRIPEKYANSIHLVTSRLPLLPELPSRLHTTNGLPPHLNKTLHRALKMSAPNFSKILQNINADLVLYDFLVPWAEKVALSQGIPAVPLLTSGAALFAYFFEFLKRPGEEFLFEAIRLSKRAQDKHREAFGTEPPEEDFLAPAQAGIMLMCTSRVIEAKYLDYCQKLTNVKVVPVGAPFQDALTEDIDDPELMRWLDTKPPHSVVYVSFGSEAFLSREDMEEVAFGLVLSGSNFIWVARFPKGAERRLEDVLPPGFLDRVGDRGRVLDHLVPQAHILNHPSTGGFISHCGWNSVMESIDFGVPIIAMPMQWDQPINARLLVELGVAVEIPRDEDGRVHRAEIARVLKDVMSGPTGQKLRANVADIAARLRARREPEMGAAAEELRKLGRNRNAYK

SEQ ID NO: 794 - protein, 440 aa, Artificial Sequence
  engineered beta-1,2-glycosyltransferase encoded in plasmid pA33037
QTQTVTMFPWLGLGHVNPFLRIAKQMADRGHVIHVVSSAVNLNMTKKRIPEKYQNSIHLVTLRLPELPELPSYYHTTNGLPPHLNKTLRKALKMAAGNYSKNLSNINLDLVLYDFLVPWASKVALEQGIPAVPLATSGAALFAYFFNFNKRPGEEFLFEAIRLSKREQDKLREAFGTVPPEEDFLAPAQAGAMLMCTSRVIEAKYLDYLTKLTNVKVVPVGPPFQTPLTEDIDDPELMRWLDTKPPHSVVYVSFGSEAFLSREDMEEVAFGLELSGVNFIWVARFPKGLEQRLEDVLPPGFLERVGDRGRVLDHLVPQAHILSHPSTGGFISHCGWNSVMESIDFGVPIIAMPMQWDQPINARLLRELGVAVEIPRDEDGRVHRAEIARVLRDVISSPTGEKLRANSRDISARLRARREEEMNAAAEELMQLHRNRNAYN

SEQ ID NO: 795 - protein, 440 aa, Artificial Sequence
  engineered beta-1,2-glycosyltransferase encoded in plasmid pA33038
LTLQVTMFPWLGLGHVNPFLRIAKQLADRGFIIYVVSTAVNLELAKKRIPEKYACSIHLVTLTLPLLPELPSHLHTTNGLPPHLNKTLHKALQMSRPNFSKILQNVNPSLVLYDFLVPWAERVALDQGIPAVPLLTSGAALFAYFFNFLKRPGNEFPFEAIHLSKREQDKHREMFGREPPEEDFLAPAQAGIMLMCTSRVIEAKYLDYCQKLTNVKVVPVGAPFQDALTCDLDDPELMDWLDTKPPHSVVYVSFGSEAFLSREDMEEVAFGLELSGSNFIWVARFPKGAEQRLEDVLPPGFLERVGDRGRVLDHLVPQAHILNHPSTGGFISHCGWNSVMESIDFGVPIIAMPMQWDQPINARLLVELGVAVEIPRDEDGRVHRAEIARVLKDVIFGPTGEKLRRNVADIARRLRAAREPEMGAAAEELIKLCRNLNAYK

SEQ ID NO: 796 - protein, 440 aa, Artificial Sequence
  engineered beta-1,2-glycosyltransferase encoded in plasmid pA33040
QTQTVTMFPWLGLGHVNPFLRIARQMADRGFVIHVVSTAVNLEMAKHRITEKYQNSIHLVTLRLPELPELPSHLHTTNGLPPHLNKTLHKALQMSAPTLSKILQNINLTLVLYDFLVPWAEKVALSQGIPAVPLLTSGAALFAYFFNHLKRPGEEFPFEAIRLSKRELDKLYEMFGTEPPEEDFLAPAQAGAMLMCTSRVIEAKYLDYLAKLTNVKVVPVGAPFRTALTEDIYDPELMRWLDTKPPHSVVYVSFGSEAFLSREDMEEVAFGLELSGVNFIWVARFPKGLEQRLEDVLPPGFLERVGDRGRVLDHLVPQAHILNHPSTGGFISHCGWNSVMESIDFGVPIIAMPMQWDQPINARLLRELGVAVEIPRDEDGRVHRAEIARVLKDVISGPTGEKLRANVRDIAARLRARREVEMNAAAEELMKLCRNRLAAN

SEQ ID NO: 797 - protein, 440 aa, Artificial Sequence
  engineered beta-1,2-glycosyltransferase encoded in plasmid pA33041
QTQRVTMFPWLGLGHVNPFLRIAKDLADRGFVIYLVSTAVNLEMIKKRIPNKYSNLIHLVEVRLPELPELPPHYHTTNGLPPHLNKTLRKALKLAAGEYSKRLSNISSSLVLYDFLVPWAEKVALSQGIGAVPLLTSGAALFAYFFNFLKRPGEEFLFEAIRLSKREQDKTREAFGTEPPEEDFLAPAQAGITLMCTSRVIEAKYLDYCTKFTGVKVVPVGPPYQDPLTEDIDDPELMRWLDTKPPHSVVYVSFGSEAFLSREQMEEVAWGLELSGVNFIWVARFPKGAEARLEDVLPRGFLDRVGDRGRVLDHLVPQAHILSHRSTGGFISHCGWNSVMESIDFGVPIIAMPMQWDQPINARLLVELGVGVEIPRDEDGRVHRAEIARVLKDVISGPTGEKLRANVRDIAARLRARRDEEMDAAAEALRSLCRNRSAYN

SEQ ID NO: 798 - protein, 440 aa, Artificial Sequence
  engineered beta-1,2-glycosyltransferase encoded in plasmid pA33042
QTQRVTMFPWLGLGHVNPFLRIAKQLADRGFVTHLVSTAVVLEMAKKRITNKYSNSIHLVELRLPELPELPSHYHTTNGLPPHLNKLLHKALQMSAPELSKQLGTIKITLVLYDFLVPWAEKLALSQGIPAVPLLTSGAALFAYFFNFLTRPGEEFPFEAIRLSKREKDKMYEMFGTEPPELDFLAPAQAGITLMCTSRVIEAKYLDYCSKLTNVKVVPVGPSFQDPLTEDIDDPELMRWLDTKPPHSVVYVSFGSEAFLSREQMEEIAFSLELSGVNFIWVARFPKGEEQRLEDVLPPGFLERVGDRGRVRDHLVPQAHILNHKSTGGFMSHCGWNSVMESIDFGVPIIAMPMQWDQPINARLLVELGVAVEIPRQEDGRVHRAEIARVLKDVISGPLGEKLRANVADIAARLRARRELEMTAAAETLIQLGRNRNASN

SEQ ID NO: 799 - protein, 440 aa, Artificial Sequence
  engineered beta-1,2-glycosyltransferase encoded in plasmid pA33043
PTLTVTMFPWLGLGHVNPFLRIAKQLADRGFVIYVVSTKVNLEMAKKRIPEKYSQSIHLVTLSLPELPELPSHLHTTNGLPPHLNKTLHKALKMSAPNFSKILQNINSTLVVYDFLAPWAEKVALSQGVPAVPLLTSGAALFAYFFNFLTRPGEEFPFEAIHLSKREQAKMREMFGREPPEEDFLAPARSAIMLMCTSRVIEAKYLDYCQKLTNVKVVPVGAPFQDPLTEDLDDPELMRWLDTKPPHSVVYVSFGSEAFLSREDMEEVAFGLELSGVNFIWVARFPKGEEQRLEDVLPRGFLERVGDRGRVLDHLVPQACILNHPSTGGFISHCGWNSVMESIDFGVPIIAMPMQWDQPINARLLVELGVAVEIPRREDGSVHRDEIARVLKDVIFGPTGEKLRRNVADIARRLRATREEEMNAAAEALLQLCRKRLAYV

SEQ ID NO: 800 - protein, 440 aa, Artificial Sequence
  engineered beta-1,2-glycosyltransferase encoded in plasmid pA33044
QTLRVTMFPWLGLGHVNPFLRLAKQLADRGFVIYLVSTAVNLNMIKGRIPEAYSNLIHLVELRLPELPELPPHYHTTNGLPPHLNKTLRKALKLSAPEVSKVLQNINPALVLVDFLVPWASKLALEQGIGAVPLLTSGAALFAYFFNFLKRPGEEFLFEAIRLSKRAQDKLREAFGTEPPEEDFLAPAQAGITLMCTSRVIEAKYLDYCMKLTNVKVVPVGPPFQDALYEDIRDPELMDWLDTKPTHSVVYVSFGSEAFLSREDMEEVAFGLELSGVNFIWVARFPKGEEQRLEDVLPNGFLERVGDRGRVLDHLVPQAHILHHKSTGGFMSHCGWNSVMESIDFGVPIIAMPMQWDQPINARLLRELGVAVEIPRDELGRVHRAEIARVLKDVISGPTGQKLRANSRDLAARLRARRDVEMDAAAEELRKLGRNRSAFN

SEQ ID NO: 801 - protein, 440 aa, Artificial Sequence
  engineered beta-1,2-glycosyltransferase encoded in plasmid pA33046
PTLTVTMFPWLGLGHVNPFLRLAKQLADRGMVIYVVSTKVNLEMAKKRIPEKYSQSIHLVESSLPELPELPSHYHTTNGLPPHLNKTLRKALKMAAPNFSKILSNINSTLVVYDFLAPWAEKVALEQGVPAVPLLTSGAALFAYFFNFLKRPGEEFPFEAIHLSKREQAKMREAFGREPPEEDFLAPARAAIMLMCTSRVIEAKYLDYCTKLTNVKVVPVGPPFQDPLTEDIDDTELMRWLDTKPPHSVVYVSFGSEAFLSREDMEEVAFGLELSGVNFIWVARFPKGEEQRLEDVLPRGFLERVGDRGRVLDHLVPQAHILSHPSTGGFISHCGWNSVMESIDFGVPIIAMPMQWDQPINARLLVELGVAVEIRRREDGSVHRDEIARVLKDVISGPTGEKLRRNVADLARRLRATREEEMNCAAEALIQLHRKRLAYV

SEQ ID NO: 802 - protein, 440 aa, Artificial Sequence
  engineered beta-1,2-glycosyltransferase encoded in plasmid pA33047
QTLQVTMFPWLGLGHVNPFLRIARQMADRGFVIHLVSSAVQLEMLKKRIPEKYSNLIHLVELRLPLLPELPPHLHTTNGLPPHLNKTLRRALQMAAGEFSKISSTINPALVLYDFLVPWAEKRALSQGIPAVPLLTSGAALFAYFFNFVKRPGEEFPFEAIRLSKREKDKHREMFGTEPPELDFLAPAQAGIMLMCTSRVIEAKYLDYCAELTNVKVVPVGPPYQTALTEDISDPELMDWLDTKPPHSVVYVSFGSEAFLSREDMEEVAFGLELSGMPFIWVARFPKGEEQRLEDVLPSGFLDRVGDRGRVLDHLVPQAHILSHKSTGGFISHCGWNSVMESIDFGVPIIAMPMQWDQPINARLLRELGVAVEIPRDEDGRVHRAEIARVLKDVISGPTGQKLRANSADIAARLRARREEEMNIAAEELLRLCRNRNATK

SEQ ID NO: 803 - protein, 440 aa, Artificial Sequence
  engineered beta-1,2-glycosyltransferase encoded in plasmid pA33048
QTQQVTMFPWLGLGHVNPFLRIAKQLADRGFVIYVVSSAVNLNMTKKRITEKYANSIHLVTSRLPLLPELPSHLHTTNGLPPHLNKTLRRALKMSAPNFSKILQNINADLVLYDFLVPWAEKVALSQGIPAVPLLTSGAAVFAYFFNHLKRPGEEFLFEAIRLSKRAQDKHREALGTEPPEEFFLAPAQAGIMLMCTSRVIEAKYLDYCQKLTNVKVVPVGAPFRDALTEDIDDPELMRWLDTKPPHSVVYVSFGSEAFLSREDMEEVAFGLVLSGSNFIWVARFPKGAERRLEDVLPPGFLERVGDRGRVLDHLVPQAHVLNHPSTGGFISHCGWNSVMEAIDFGVPIIAMPQQWDQPINARLLVELGVAVEIPRDEDGRVHRAEIARVLKDVISGPTGQKLRANVADIAARLRARREPEMGAAAEELRKLHRNRNAYK

SEQ ID NO: 804 - protein, 440 aa, Artificial Sequence
  engineered beta-1,2-glycosyltransferase encoded in plasmid pA33051
QTLQVTMFPWLGLGHVNPFLRIARQMADRGFVIHLVSSAVQLEMLKKRIPEKYSNLIHLVELRLPLLPELPPHLHTTNGLPPHLNKTLRRALQMAAGEFSKISSTINPALVLYDFLVPWAEKVALSQGIPAVPLLTSGAALFAYFFNHVKRPGEEFPFEAIRLSKREKDKHLEMMGTEPPELDFLAPAQAGIMLMCTSRVIEAKYLDYCAELTNVKVVPVGPPYQTALTEDISDPELMDWLDTKPPHSVVYVSFGSEAFLSREDMEEVAFGLELSGMPFIWVARFPKGEEQRLEDVLPSGFLDRVGDRGRVLDHLVPQAHILSHKSTGGFISHCGWNSVMEAIDFGVPIIAMPIQWDQPINARLLRELGVAVEIPRDEDGRVHRAEIARVLKDVISGPTGQKLRANSRDIAARLRARREEEMNIAALELLQLCRNRNATK

SEQ ID NO: 805 - protein, 440 aa, Artificial Sequence
  engineered beta-1,2-glycosyltransferase encoded in plasmid pA33053
QSLRVTMFPWLGLGHVNPFLRIARQMADRGMVIHLVSTAVQLELLRKRIPEKYSSSIQLVELTLPLLPELPPHLHTTNGLPPHLNKTLHKALQMSAPEFSKILQDVNPALVLYDFLVPWAEKVALSQGIPAVGLLTSGAALFAYFFNFLQRPGNEFPFEAIRLSKSEKTKHREMFGREPPELDFLAPAAAGIMLMCTSRVIEAKYLDYCAELDNVKVVPVGPPFQTALYEDISDPELMDWLDTKPPHSVVYVSFGSEAFLSREDMEEVAFGLELSSSNFIWVARFPKGEEQRLEDVLPSGFLERVGDRGRVLDHLVPQAHILNHKSTGGFISHCGWNSVMESIDFGVPIIAMPMQWDQPINARLLRELGVAVEIPRDEDGRVHRDEIARVLKDVISGPTGEKLRRNVRDIARRLRATREEEMNIAALELLQLCRNRNATK

SEQ ID NO: 806 - protein, 440 aa, Artificial Sequence
  engineered beta-1,2-glycosyltransferase encoded in plasmid pA33054
QTLRVTMFPWLGLGHVNPFLRIAKQLADRGFVIYVVSTAVNLNMIKKRIPEKYRNSIHLVTSRLPELPELPPYLHTTNGLPPHLNKTLHRALQLAAPELSKQLSNIKATLVLYDFLVPWAEKVALDQGIPAVPLATSGAALFAYFFNFNKRPGEEFPFEEIRLSKRELDKHREAFGTVPPELDFLAPAQAGAMLMCTSRVIEAKYLDYLAKLTNVQVVPVGAPFQTALTEDIDDPELMRWLDTKPPHSVVYVSFGSEAFLSREQMEEVAFGLELSGLPFIWVARFPKGLEQRLEDVLPHGFSERVGDRGRVLDHLVPQAHILSHKSTGGFISHCGWNSVMESIDFGVPIIAMPMQWDQPINARLLVELGVGVEIPRDEDGRVHRAEIARVLRDVISSPTGEKLRANSRDIAARLRARRDEEMNAAAEELRQLGRNRLAYK

SEQ ID NO: 807 - protein, 440 aa, Artificial Sequence
  engineered beta-1,2-glycosyltransferase encoded in plasmid pA33056
QTLQVTMFPWLGLGHVNPFLRIAKQLADRGFVIYLVSTAVNLNMLKKRITYAYQNSIHLVTVRLPELPELPSHLHTTNALPPHLNKTLHRALKMSAPTFSKILQNIKASLVLYDFLVPWAEKIALEQGIPAVPLLTSGAALFAYFFQFLKRLGEEFPFEAIRLSKRAQDKLYEAFGTEGPELFFLAPAQAGIMLMCTSRVIEAKYLDYCAKLTNVQVVPVGAPYLVLLTEDIRDPELMRWLDTKPPHSVVYVSFGSEAFLSREDMEEIAFGLVLSGSNFIWVARFPKGEERRLEDVLPPGFLDRVGDRGRVLTHLVPQAHILSHPATGGFISHCGWNSVMEAIDFGVPIIAMPMQWDQPINARLLVELGVAVEVPRDEDGRVHRAEIARVLKDVISGPLGEILRANVADIAARLRARREPEMTAAAEALISLCRNRNAYK

SEQ ID NO: 808 - protein, 440 aa, Artificial Sequence
  engineered beta-1,2-glycosyltransferase encoded in plasmid pA33057
DTLRVTMFPWLGLGHVNPFLRIAKQLADRGFIIYLVSTKVNLELIKKRIPEKYSDSIHLVPLRLPELPELPPHYHTTNGLPPHLNKTLHKALKMSAPEVSKQLQNINPALVLVDFLVPWASKLALEQGIGAVGLLTFGAALFAYFFNHLKRPGLEFPFEAIRLSKREQDKLQEMFGTERPEEDFLAVASSAITLMCTSRVIEAKYLDYCMKLLNVKVVPVGPPFQDAYYLDIRDPELMDWLDTKPTHSVVYVSFGSEAFLSREDMEEVAFGLELSGVNFIWVARFPKGEEQRLEDVLPKGFLERVGDRGRVLDGLVPQASVLNHKSTGGFMSHCGWNSVMESIDFGVPIIAMPMQWDQPINARLLRELGVAVEIPRDELGRVHRDEIARVLKDVISGPTGEKLRRNVRDIARRLRAAREEEMNAAALELLKLGRNRSAKK

SEQ ID NO: 809 - protein, 440 aa, Artificial Sequence
  engineered beta-1,2-glycosyltransferase encoded in plasmid pA33058
DTLRVTMFPWLGLGHVNPFLRLAKQLADRGFIIYLVSTKVNLNLIRGRIPEKYSSSIHLVELRLPELPELPPHYHTTNGLPPHLNKTLRKALKLSAPEVSKVLQNINPALVLVDFLVPWAEKLALEQGVGAVGLATSGAALFAYFFNFLKRPGLEFLFEAIRLSKRAQDKLREAFGTEPPEEDFLAVASAAIMLMCTSRVIEAKYLDYCTKLTNVKVVPVGPPFQDALMEDIRDTELMDWLDTKPTHSVVYVSFGSEAFLSREDMEEVAFGLELSGVNFIWVARFPKGEEQRLEDVLPNGFLERVGDRGRVLDHLVPQAHILHHPSTGGFMSHCGWNSVMESIDFGVPIIAMPMQWDQPINARLLRELGVAVEIPRDELGRVHRSEIAKVLKDVISGPTGEKLRRNVRDLARRLRAARDEEMDAAALELIQLGRNRSAQK

SEQ ID NO: 810 - protein, 440 aa, Artificial Sequence
  engineered beta-1,2-glycosyltransferase encoded in plasmid pA33059
QTLRVTMFPWLGLGHVNPFLRIAKQLADRGFIIYVQSTKVNLELAKKRIPEKYRNSIHLVTLSLPELPELPPHLHTTNGLPPHLNKTLHKALKMSSPELSKQLQNIKATLVLYDFLLPWAERSALSQGIPAVPLLTSGAALFAYFFNFLKRPGEEFPFEAISLSKRELAKMREMFGREPPEEDFLAPAQSAAMLMCTSRVIEAKYLDYLAKLTNVKVVPVGAPFQDAFTVDLDDPELMRWLDTKPPHSVVYVSFGSEAFLSREQMEEVAFGLELSGLNFIWVARFPKGLEQTLEDVLPHGFSERVGDRGRVLDHLVPQACILNHKSTGGFISHCGWNSVMESIDFGVPIIAMPMQWDQPINARLLVELGVAVEISRDEDGRVHRDEIARVLKDVISGPTGEKLRANVRDIARRLRAARELEMNIAAEELLQLCRNLLAYK

SEQ ID NO: 811 - protein, 440 aa, Artificial Sequence
  engineered beta-1,2-glycosyltransferase encoded in plasmid pA33060
QTLRVTMFPWLGLGHVNPFLRIAKDLADRGHVIYLVSTAVMLNMTKKRIPEKYSNLIHLIELRLPELPELPPHYHTTNGLPPHLNKTLRKALKLSAGEFSKQSSTISSSLVLYDFLVPWAEKVALDRGIPQVPLLTSGAALFAYFFNFVKRLGEEFPFEAIRLSKRAQDKTREMFGTEPPEEDFLAPAQAGIMLMCTSRVIEAKYLDYCAKLTNVKVVPVGPPFQDPLTEDIDDPELMRWLDTKPTHAVVYVSFGSEAFLSREQLEEIAFGLELSGKPFIWVARFPKGEEARLEDVLPRGFTDRVGDRGRVLDHLVPQAHILHHKATGGFISHCGWNSVMESIDFGVPIIAMPMQWDQPINARLLVELGVAVEIPRDEDGRVHRAELARVLRDVISGPTRERLRANVADIAARLRARRDEEMDAAADELMKLCRNRSAKV

SEQ ID NO: 812 - protein, 440 aa, Artificial Sequence
  engineered beta-1,2-glycosyltransferase encoded in plasmid pA33061
GTLRVTMFPWLGLGHVNPFLRIAKQLADRGHIIHLVSTSVNLELAAKRIPEKYSNSIHLVELRLPELPELPPHYHTTNGLPPHLNKTLHKALKMSAPEFSKQSQNISSSLVCYDFLAPWACKVALDRGIPQVPLLTSGAALFAYFFNFLKRPGSEFPFEAIRLSKNEQTKTREMFGAEPPEEDFLAPAQAAIMLMCTSRVIEAKYLDYCQKLTNVKVVPVGPSFQDPVTCDIDDPELMRWLDTKRTHAVVYVSFGSEAFLSREQMEEIAFGLELSGMNFIWVARFPKGREQALEDVLPKGFTERVGDRGRVLDHLVPQAHILNHPSTGGFISHCGWNSVMESIDFGVPIIAMPMQWDQPINARLLVELGVAVEIARDEDGRVHRDEIARVLKDVISGPTGERLRRNVADIARALRATREEEMNAAAVALMALCRNRSAYV

SEQ ID NO: 813 - protein, 440 aa, Artificial Sequence
  engineered beta-1,2-glycosyltransferase encoded in plasmid pA33063
QTQRVTMFPWLGLGHVNPFLRIAKDLADRGFVIYLVSTAVNLEMIKKRIPNKYSNLIHLVEVRLPELPELPPHYHTTNGLPPALNKTLRKALKLAAGEYSKRLSNISSSLVLYDFLVPWAEKVALSQGIGAVPLLTFGAALFAYFFNHLKRPGEEFLFEAIRLSKREQDKTTEALGTVSPEEFFLAPAQAGITLMCTSRVIEAKYLDYCTKFTGVKVVPVGPPYQDPLTEDIDDPELMRWLDTKPPHSVVYVSFGSEAFLSREQMEEVAWGLELSGVNFIWVARFPKGAEARLEDVLPRGFLDRVGDRGRVLDHLVPQAHILSHRSTGGFISHCGWNSVMEAIDFGVPIIAMPQQWDQPINARLLVELGVGVEIPRDEDGRVHRAEIARVLKDVISGPTGEKLRANVRDIAARLRARRDEEMDAAAEALRSLCRNRSAYN

SEQ ID NO: 814 - protein, 440 aa, Artificial Sequence
  engineered beta-1,2-glycosyltransferase encoded in plasmid pA33065
QTLRVTMFPWLGLGHVNPFLRLAKQLADRGFVIYLVSTAVNLNMIKGRIPEKYSNLIHLVELRLPELPELPPHYHTTNGLPPALNKLLRKALKLSAPEVSKVLQNINPALVLVDFLVPWASKLALEQGIGAVPLLTAGAAVFAYFFNHLKRPGEEFLFEAIRLSKRALDKLQEAFGTESPEEDFLAPAQAGITLMCTSRVIEAKYLDYCMKLTNVKVVPVGPPFQDALYEDIRDPELMDWLDTKPTHSVVYVSFGSEAFLSREDMEEVAFGLELSGVNFIWVARFPKGEEQRLEDVLPNGFLERVGDRGRVLDHLVPQAHVLHHKSTGGVMSHCGWNSVMEAIDFGVPIIAMPQQWDQPINARLLRELGVAVEIPRREFGRVHRAEIARVLKDVISGPTGQKLRANVRDLAARLRARRDVEMDAAAEELRQLGRNRSAKN

SEQ ID NO: 815 - protein, 440 aa, Artificial Sequence
  engineered beta-1,2-glycosyltransferase encoded in plasmid pA33066
QSLRVTMFPWLGLGHVNPFLRIARQMADRGMVIHVVNSSVQLNMLRKRIPEKYSSSIQLWESTLPLLPELPPHYHTTNGLPPHLNKTLRKALKMAAGEFSKISSDVNPALVLYDFLVPWASKRALEQGIPAVRLLTSGAALFAYFFNFVKRPGEEFPFEAIRLSKREKTKHREMFGRVPPELDFLAPASAGIMLMCTSRVIEAKYLDYCTELTNVKVVPVGPPYQDPLTEDISDPELMDWLDTKPPHSVVYVSFGSEAFLSREDMEEVAFGLELSQVPFIWVARFPKGEEQRLEDVLPSGFLDRVGDRGRVLDHLVPQAHILSHPSTGGFISHCGWNSVMESIDFGVPIIAMPMQWDQPINARLLRELGVAVEIPRDEDGRVHRSEIARVLKDVISGPTGEKLRRNSRDIARRLRATREEEMNIAAEELIQLCRNRNATK

SEQ ID NO: 816 - protein, 440 aa, Artificial Sequence
  engineered beta-1,2-glycosyltransferase encoded in plasmid pA33067
PTQRVTMFPWLGLGHVNPFLRIAKDLADRGFVIYLVSTAVNLEMIKKRIPNKYSDLIHLVEVRLPELPELPPHYHTTNGLPPHLNKTLRKALKLAAGEYSKRLSNVSSSLVLYDFLVPWAEKVALSQGIGAVPLLTSGAALFAYFFNFLKRPGAEFLFEAIRLSKSEQRKTREAFGTEPPEEDFLAPAQAGIMLMCTSRVIEAKYLDYCTKFTGVKVVPVGPPYQDPLTLDIDDPELMRWLDTKREHSVVYVSFGSEAFLSREQMEEVAWGLELSQVNFIWVARFPKGAEARLEDVLPRGFLDRVGDRGRVLDHLVPQAHILSHRSTGGFISHCGWNSVMESIDFGVPIIAMPMQWDQPINARLLVELGVGVEIPRDELGRVHRSEIARCLKDVISGPTGEKLRKNVRDIAARLRASRDEEMDAAAEALRSLCRNLSAYN

SEQ ID NO: 817 - protein, 440 aa, Artificial Sequence
  engineered beta-1,2-glycosyltransferase encoded in plasmid pA33068
GTLRVTMFPWLGLGHVNPFLSIAKQLADRGHVIYLVSTSVNLELARKRITEKYSNSIHLVELRLPELPELPPHYHTTNGLPPHLNATLHKALKMSAPEFSKQSQNISSSLVCYDLLAPWACKVALDRGIPQVPLLTSGAALFAYFFNFLKRPGSEFPFEAIRLSKNEQTKTREMFGAESPEEDFLAPAQAAIMLMCTSRVIEAKYLDYCAKLTNVKVVPVGPPFQDPVTCDIDDPELMRWLDTKRTHAVVYVSFGSEAFLSREQMEEIAFGLELSGMNFIWVARFPKGLEQALEDVLPKGFTERVGDRGRVLDGLVPQAHILNHPSTGGFISHCGWNSVMESIDFGVPIIAMPMTWDQPINARLLVELGVAVEIARDEDGRVHRDEIARVLKDVISGPTGERLRRNVADIARALRATREEEMNAAAVALIALGRNRSAYV

SEQ ID NO: 818 - protein, 440 aa, Artificial Sequence
  engineered beta-1,2-glycosyltransferase encoded in plasmid pA33069
QTQTVTMFPWLGLGHVNPFLRIAKQMADRGFVIHVVSSAVNLNMTKKRIPEKYQNSIHLVTLRLPELPELPSYLHTTNGLPPHLNKTLRRALQMAAGNLSKNLQNINATLVLYDFLVPWASKVALSQGVPAVPLATSGAALFAYFFNFNKRPGEEFLFEAIRLSKRELDKLREAFGTVPPEEDFLAPAQAGAMLMCTSRVIEAKYLDYLAKFTNVQVVPVGTPFQTALTEDIYDPGLMDWLDTKPPHSVVYVSFGSEAFLSREDMEEVAFGLELSGVNFIWVARFPKGLEQRLEDVLPPGFLERVGDRGRVLDHLVPQAHILSHPSTGGFISHCGWNSVMESIDFGVPIIAMPMQWDQPINARLLRELGVAVEIPRDEDGRVHRAEIARVLRDVISSPTGEKLRANSRDIAARLRARREVEMNAAAEELMRLCRNRLAAN

SEQ ID NO: 819 - protein, 440 aa, Artificial Sequence
  engineered beta-1,2-glycosyltransferase encoded in plasmid pA33070
LTLTVTMFPWLGLGHVNPFLRLAKQLADRGFVIYLQSTKVNLEMAKKRIPEKYSCSIHLVTSSLPELPELPSHLWTTNGLPPHLNKTLHKALKMAAPNFSKVLQNINSTLVVYDFLAPWAEKSALSQGVPAVPLLTSGAALFAYFFNFLTRPGEEFPFEAIHLSKREQAKMREAFGREPPEEDFLAPARSAIMLMCTSRVIEAKYLDYCQKLTNVKVVPVGTPFQDPLTEDIDDTELMRWLDTKPPHSVVYVSFGSEAFLSREDLEEVAFGLELSGVNFIWVARFPKGEEARLEDVLPRGFLERVGDRGRVLDHLVPQAAILSHPSTGGFISHCGWNSVMESIDFGVPIIAMPMQWDQPINARLLVELGVAVEIRRREDGSVHRDEIARVLKDVISGPTGEKLRRNVADLARRLRATREEEMNCAAEALLQLCRKHLAYV

SEQ ID NO: 820 - protein, 440 aa, Artificial Sequence
  engineered beta-1,2-glycosyltransferase encoded in plasmid pA33071
QTLRVTMFPWLGLGHVNPFLRIAKQLADRGFIIYVQSTSVNLELAKKRITEKYRNSIHLVTLSLPELPELPPHLHTTNGLPPHLNKTLHKALQMSAPELSKQLQNIKATLVLYDFLVPWAERVALSQGIPAVPLLTSGAALFAYFFEHLKRPGEEFPFEAISLSKRELAKHQEMFRRERPEEDFLAPAQSAAMLMCTSRVIEAKYLDYLAKLTNVKVVPVGAPFQDAFTVDLDDPELMRWLDTKPPHSVVYVSFGSEAFLSREQMEEVAFGLELSGLNFIWVARFPKGLEQTLEDVLPKGFSERVGDRGRVLDHLVPQAHVLNHKSTGGFISHCGWNSVMESIDFGVPIIAMPMTWDQPINARLLVELGVAVEISRDEDGRVHRDEIARVLKDVISGPTGEKLRKNVRDIAALLRAARELEMNIAAEELLQLCRNLLAYK

SEQ ID NO: 821 - protein, 440 aa, Artificial Sequence
  engineered beta-1,2-glycosyltransferase encoded in plasmid pA33074
QLLRVTMFPWLGLGHVNPFLRIAKQLADRGFVIYLVSTPIMLEMIRKRITEKYSDSIILVTLRLPELPELPPHLHTTNGLPPHLNKVLHKALKMSAPEFSKILQNISPTLVLADLLAPWACKVALERGIPQVPLLTSGAALFAYFVNFLKRPGEEFPFEAISLSKNEQIKLVEMFGTEPPEEDFLAVARANIMLMCTSRVIEAKYLDYCQKLTNVKVVPVGPPFLDPVTLDISDPELMRWLDTKPTHAVVYVSFGSEAFLSREQMEEIAFGLELSLVNFIWVVRFPKGVEQLLEDVLPTGFLERVGDRGRVLDGLVPQAHILNHPSTGGFISHCGWNSVMESIDFGVPIIAMPMTWDQPINARLLVELGVAVEIRRDEDGRVHRDEIARVLKDVINGALGEILRRNVMDIARLLRATREEEMNIAAEELMKLCRNLSALV

SEQ ID NO: 822 - protein, 440 aa, Artificial Sequence
  engineered beta-1,2-glycosyltransferase encoded in plasmid pA33075
QSLRVTMFPWLGLGHVNPFLRIAKQMADRGFVIYLVSTAINLEMIKKRIPYKYLNSIHLITVRLPLLPELPSYLHTTNGLPPHLNKVLHRALKLAAPTLSKILQNIKIDLVLYDFLVPWAEKVALEQGVPAVPLLTSGAALFAYFVQFNTRLGEEFPFEEIRLSKRELDKTREAFGTEPPELDFLAPAQAGIMLMCTSRVIEAKYLDYLSKLTNVQVVPVGTSFQLVLMEDISDPELMRWLDTKPPHAVVYVSFGSEAFLSREQMEEIAFGLELSGLPFIWVVRFPKGLEQRLIDVLPKGFLERVGDRGRVLTHLVPQAHILSHKATGGFISHCGWNSVMESIDFGVPIIAMPMQWDQPINARLLVELGVAVEIPRDELGRVPRAEIARVLRDVISSPTGEKLRANVRDLAARLRARREEEMNIAAVELIILCRRRLAYK

SEQ ID NO: 823 - protein, 440 aa, Artificial Sequence
  engineered beta-1,2-glycosyltransferase encoded in plasmid pA33076
DTLRVTMFPWLGLGHVNPFLRLAKQLADRGFAIYLVSTSVNLNLIRKRIPEKYSDLIHLVELRLPELPELPPHYHTTNGLPPHLNKTLRKALKLSAPEVSKVLQNINPALVLVDFLVPWASKLALEQGIGAVGLATSGAALFAYFFNFLKRPGLEFLFEAIRLSKRAQDKLREAFGTEPPEEDFLAVASSAIMLMCTSRVIEAKYLDYCMKLTNVKVVPVGPPFQDATMSDIRDTELMDWLDTKPTHSVVYVSFGSEAFLSREDMEEVAFGLELSGVNFIWVARFPKGEEQRLEDVLPNGFLERAGDRGRVLDHLVPQASILHHKSTGGFMSHCGWNSVMESIDFGVPIIAMPMQWDQPINARLLRELGVAVEIPRDELGRVHRSEIAKVLKDVISGPTGQKLRKNSRDLARRLRAARDEEMDAAAEELRQLGRNRSAFK

SEQ ID NO: 824 - protein, 440 aa, Artificial Sequence
  engineered beta-1,2-glycosyltransferase encoded in plasmid pA33077
QTLQVTMFPWLGLGHVNPFLRIAKQLADRGFIIYLVSTSIMLNMIAKRIPEKYSDSIILIEVRMPELPELPPHYHTTNGLPPHLNKTLRKALKMSAPEFSKILQNINSTLVLADFLAPWACKVALERGIPAVPLLTSGAALFAYFFNFVKLPGEEFLFEAIRLSKRELIKLREMFGTVPPEEDFLAVASANIMLMCTSRVIEAKYLDYLTKLTNVKVVPVGPPFQDPLTEDLDDTELMRWLDTKPTHSVVYVSFGSEAFLSREQMEEIAFGLELSLVPFIWVVRFPKGEERLLEDVLPTGFLERVGDRGRVLDHLVPQAHILNHPATGGFISHCGWNSVMESIDFGVPIIAMPMQWDQPINARLLVELGVCVEIRRDEDGRVPREELAKVLRDVISGKLREVLRARVRDIATLLRRTREEEMNIAALALIQLCRNRSALK

SEQ ID NO: 825 - protein, 440 aa, Artificial Sequence
  engineered beta-1,2-glycosyltransferase encoded in plasmid pA33078
QTLRVTMFPWLGLGHVNPFLRIAKQLADRGFVIYVVSTAINLNMIKKRITEKYRNSIHLVTSRLPELPELPPYLWTTNGLPPALNKTLRRALQLAAPELSKQLSNIKATLVLYDFLVPWAEKVALSQGIPAVPLATAGAAVFAYMWNHNKRPGEEFPFEEIRLSKRELDKMYEAVGTVPPELFFLAPAQAGAMLMCTSRVIEAKYLDYLAKLTNVQVVPVGAPFQDALTEDIDDPELMRWLDTKPPHSVVYVSFGSEAFLSREQMEEVAFGLELSGLPFIWVARFPKGLEQRLEDVLPHGFSERVGDRGRVLDHLVPQAHVLSHKSTGGFISHCGWNSVMEAIDFGVPIIAMPMQWDQPINARLLVELGVGVEIPRDEDGRVHRAEIARVLRDVISSPTGEKLRANSRDIAARLRARRDEEMNAAAEELRQLGRNRLAYK

SEQ ID NO: 826 - protein, 440 aa, Artificial Sequence
  engineered beta-1,2-glycosyltransferase encoded in plasmid pA33079
GTLRVTMFPWLGLGHVNPFLRIAKDLADRGHVIYLVSTSVNLNLTAKRIPEKYSNSIHLIELRLPELPELPPHYHTTNGLPPHLNKTLRKALKLSAGEFGKQSSTINSSLVVYDFLAPWAEKVALERGIPAVPLLTSGAALFAYFFNFVKRPGSEFPFEAIRLSKREQTKTREMFGAEPPEEDFLAPARAAIMLMCTSRVIEAKYLDYCTKLTNVKVVPVGPPFQDPLTEDIDDPELMRWLDTKRTHSVVYVSFGSEAFLSREQMEEIAFGLELSQVPFIWVARFPKGEERALEDVLPKGFTDRVGDRGRVLDHLVPQAHILHHPSTGGFISHCGWNSVMESIDFGVPIIAMPMQWDQPINARLLVELGVAVEVARDEDGRVHREELARVLRDVISGATRERLRRNVADIARALRATRDEEMDAAAVALIQLCRNRSAKV

SEQ ID NO: 827 - protein, 440 aa, Artificial Sequence
  engineered beta-1,2-glycosyltransferase encoded in plasmid pA33080
LTLQVTMFPWLGLGHVNPFLRIAKQLADRGFIIYVVSSAVNLELTKKRIPEAYACSIHLVTVTLPLLPELPSRLHTTNGLPPHLNKTLHRALQMSRGNFSKILQNVNPSLVLYDFLVPWAERVALSQGIPAVPLLTSGAALFAYFFEFLKRPGNEFLFEAIHLSKRAQDKHREAFGREPPEEDFLAPAQAGIMLMCTSRVIEAKYLDYCQKLTNVKVVPVGAPFQDALTCDIDDTELTRWLDTKPPHSVVYVSFGSEAFLSRRDMEEVAFGLVLSGSNFIWVARFPKGAERRLEDVLPPGFLDRVGDRGRVLDHLVPQAHILNHPSTGGFISHCGWNSVMESIDFGVPIIAMPMQWDQPINARLLVELGVAVEIPRDEDGAVHRSEIARVLKDVMSGPTGEKLRRNVADIARRLRAAREPEMGAAAEELRKLCRNLNATK

SEQ ID NO: 828 - protein, 440 aa, Artificial Sequence
  engineered beta-1,2-glycosyltransferase encoded in plasmid pA33081
LTLRVTMFPWLGLGHVNPFLRIAKQLADRGFIIYLLSTSINLELIKKRIPYKYQQSIHLVTVSLPLLPELPSHLHTTNGLPPHLNKVLHKALKMSAPTLSKILQNVKIDLVLYDFLLPWAEKVCLSQGIPAVPLLTSGAALFAYFVEFLKRPGNEFPFEAISLSKQELAKMREMFGREPPELDFLAVARANIMLMCTSRVIEAKYLDYLSKLTNVKVVPVGAPFQTATMLDISDPELMRWLDTKPPHSVVYVSFGSEAFLSREQMEEIAFGLELSGLNFIWVVRFPKGLEQSLIDVLPKGFLERVGDRGRVLDHLVPQAHILNHKSTGGFISHCGWNSVMESIDFGVPIIAMPMQWDQPINARLLVELGVAVEIPRDEDGRVHRAEIARVLKDVISGPTGEKLRKNVRDIATLLRAAREEEMNIAAVELIILCRRLLALK

SEQ ID NO: 829 - protein, 440 aa, Artificial Sequence
  engineered beta-1,2-glycosyltransferase encoded in plasmid pA33082
QTLRVTMFPWLGLGHVNPFLRIAKQMADRGFIIYVQSTSVNLNLIKKRIPEKYRNSIHLVESTLPELPELPPYYHTTNGLPPHLNKTLHRALKLSAPELSKQLSNIKATLVVYDFLLPWAEKSALEQGIPAVPLATSGAALFAYFFNFNKRPGEEFPFEEISLSKRELAKHREAFGRVPPELDFLAHAQAAATLMCTSRVIEAKYLDYLTKLTNVQVVPVGPPFQTALTEDIDDTELTRWLDTKPPHSVVYVSFGSEAFLSREQMEEVAFGLELSGVPFIWVARFPKGLEQTLEDVLPKGFSERVGDRGRVLDHLVPQAHILSHPSTGGFISHCGWNSVMESIDFGVPIIAMPMQWDQPINARLLVELGVGVEISRDEDGRVHRSEIARVLRDVISSPTGEKLRANSRDIARRLRAARELEMNIAAEELIQLCRNRLAFK

SEQ ID NO: 830 - protein, 440 aa, Artificial Sequence
  engineered beta-1,2-glycosyltransferase encoded in plasmid pA29819
STLKVLMFPWLALGHINPFLNLAKKLADRGFLIYLCSTHINLESIIKKIPDKYSEQIKLVELHLPELPELPPHYHTTNGLPPHLNGTLKKALKMSKPNFSKILQNLKPDLVIYDFLQPWAAEVAAELNIPAVMILTSGAALFSYFFNFLKRPNVEFPFPAINLRKVEQVKMRRMFESEPDEEDRLAFGNSTIMLMCTSREIEAKYLDYCSELSGVKVVPVGPPFQDPITNDADDKELIKWLNKKDEKSVVYVSFGSEYFLSREDMEEMAHGLELSNVNFIWVARFPKGEEQNLEDVLPKGFLERIGDRGRVVEHFAPQPRILNHPSTGGFISHCGWNSVMESIYFGVPIIAMPMQWDQPINARLIVELGVAVEIRRDEDGKFHREEIAEVIKKVITGETGDELRAKVRDLSKKMRSKREEEMNEAVEELIQLCRNSNKYK

SEQ ID NO: 831 - protein, 440 aa, Artificial Sequence
  engineered beta-1,2-glycosyltransferase encoded in plasmid pA29820
STLKVLMFPWLALGHINPFLNLAKRLADRGFLIYLCSTHINLESIKKKIPDKYSESIHLVELHLPYLPTLPPHYHTTNGLPPHLNGTLKKALKMSKPNFSKILQNLKPDLVIYDFLQPWAAEVANELNIPAVFILTSGAALFAYFFHFLKRPTVEFPFPAIRLSKVEQVKMRRMFEKEPDEDDRLAPGNGDIMLMCTSREIEAKYLDYCSELSGVKVVPVGPPFQDPITNDADDKELIDWLNKKDENSVVYVSFGSEYFLSREDMEEVAHGLELSNVNFIWVARFPKGEETNLEDVLPKGFLERIKDRGRVVEHFAPQPRILNHPSIGGFISHCGWNSVMESIQFGVPIIAMPMQWDQPINARLIVELGVAVEIRRDEDGKIHREEIAETLKKVITGETGQILRKKVREISENLKSKREEEMEKAVEELIQLCRNSNKYK

SEQ ID NO: 832 - protein, 440 aa, Artificial Sequence
  engineered beta-1,2-glycosyltransferase encoded in plasmid pA29821
STLKVLMFPWLALGHINPFLNLAKQLADRGFYIYLCSTHINLESIKKKIPEKYSEKIHLVELHLPHLPELPPHYHTTNGLPPHLNGTLKKALKMSKPNFSKILQNLKPDLVIYDFLQPWAEEVAAEQNIPAVFILTSGAALFAYFYNFLKRPLVEFPFPAINLRKIEQVKMREMFEKEPDEEDRLAPSNGDIMLMCTSREIERKYLDYCSELSGVKVVPVGPPFQDPITNDADDKELIEWLGKKDENSVVYVSFGSEYFLSKEDMEEMAHGLELSNVNFIWVARFPKGEETNLEDMLPKGFLERIGDRGIVVDHFAPQPRILSHPSVGGFISHCGWNSVMESIDFGVPIIAMPMQWDQPINARLIVELGVAVEIRRDEDGKIHREEIAETIKKVITGETGRELRKKVRDMSKKLKSKRDEEMNQAAEELIQLCRNSNKYK

SEQ ID NO: 833 - protein, 440 aa, Artificial Sequence
  engineered beta-1,2-glycosyltransferase encoded in plasmid pA29822
STLKVLMFPWLALGHINPFLNLAKQLADRGFKIYLCSTHINLESIKKKIPEKYSKSIHLVELHLPQLPELPPHYHTTNGLPPHLNGTLKKALKMSKPNFSKILQNLKPDLVIYDFLQPWAEKVAAEHNIPAVFILTSGAALFSYFFNFLKRPNVEFPFPAWNLSKIEQVKMREMFEKEPDEGDRLAPGNGDIMLMCTSREIEAKYLDYCTELSNVKVVPVGPPFQDPITNDADDKELIKWLNKKDENSVVYVSFGSEYFLSKEDMEEVAHGLELSNVNFIWVARFPKGEEQNLEDVLPKGFLERIKDRGRVVDHFAPQPRILSHPSTGGFISHCGWNSVMESIYFGVPIIAMPMQWDQPINARLLVELGVAVEIRRDENGKIHREEIAETIKKVITGETGHELRKKVRDISKNLKSEREEEMNEAAEKLLQLCRNSNKYK

SEQ ID NO: 834 - protein, 440 aa, Artificial Sequence
  engineered beta-1,2-glycosyltransferase encoded in plasmid pA29823
STLKVLMFPWLALGHINPFLNLAKQLARRGFMIYLCSTLINLQSIIKKIPEKYSKSIHLVELHLPELPHLPPHYHTTNGLPPHLNGTLHKALKMSKPNFSKILQNLKPDLVIYDFLQPWAEEVVAELNIPAVHILTSGAALFAYFFNFLKRPNVEFPFPAINLSKVEQVKMREMFEKEPDDEDRLAPGNGDIMIINTSREIEAKYLDYCSELSNVKVVPVGPPFQDPITNDADDKELIEWLGKKDENSVVYVSFGSEYFLSKEDMEEMAHGLELSNVNFIWVVRFPKGEEMNLEDVLPKGFLERIKDRGMVVEHFAPQPRILAHPSTGGFISHCGWNSVMESIVFGVPIIAMPMQWDQPINAKLIVELGVAVEIRRDEDGKIHREEIARALKKVITGETGRILRKKVRDISKNLKSEREEEMNRAVEELIQLCRNSNKYK

SEQ ID NO: 835 - protein, 440 aa, Artificial Sequence
  engineered beta-1,2-glycosyltransferase encoded in plasmid pA29824
STLKVLMFPWLALGHINPFLNIAKQLADRGFDIYLCSTLINLDSIKKKIPHKYSQSIHLVELHLPEFPELPPHYHTTNGLPPHLNGTLKKALKMSKPNFSKILQNLKPDLVIYDFLQPWAEEVAAELNIPAVMILTSGAALFSYFFNFLKRPSVEFPFPAIYLSKVEQVKMREMFEKEPDEEDRLAPGNSDIMLMCTSREIEAKYLDYCTELSNVKVVPVGPPFQDPITNDADDKELIEWLDKKDENSVVYVSFGSEYFLSREDMEEVAHGLELSNVNFIWVARFPKGEEQNLEDVLPKGFLERIKDRGRVVDHFAPQPRILAHPSVGGFISHCGWNSVMESLHFGVPIIAMPMQWDQPINAKLIVELGVAVEIRRDEDGKIHREEIAEVIKKVITGETGEDLRRKVREISEKLKSKGEEEMQEAAEELIQLCRNSNKYK

SEQ ID NO: 836 - protein, 440 aa, Artificial Sequence
  engineered beta-1,2-glycosyltransferase encoded in plasmid pA29825
STLKVLMFPWLALGHINPFLNIAKQLADRGFDIYLCSTLINLDSIKKKIPHKYSQSIHLVELHLPEFPELPPHYHTTNGLPPHLNGTLKKALKMSKPNFSKILQNLKPDLVIYDFLQPWAEEVAAELNIPAVMILTSGAALFSYFFNFLKRPSVEFPFPAIYLSKVEQVKMREMFEKEPDEEDRLAPGNSDIMLMCTCREIEAKYLDYCTELSNVKVVPVGPPFQDPITNDADDKELIEWLDKKDENSVVYVSFGSEYFLSREDMEEVAHGLELSNVNFIWVARFPKGEEQNLEDVLPKGFLERIKDRGRVVDHFAPQPRILAHPSVGGFISHCGWNSVMESLAFGVPIIAMPMQWDQPINAKLIVELGVAVEIRRDEDGKIHREEIAEVIKKVITGETGEDLRRKVREISEKLKSKGEEEMQEAAEELIQLCRNSNKYK

SEQ ID NO: 837 - protein, 440 aa, Artificial Sequence
  engineered beta-1,2-glycosyltransferase encoded in plasmid pA29826
STLKVLMFPWLALGHINPFLNLAKQLARRGFLIYLCSTLINLQSIIKKIPEKYSKSIHLVELHLPELPHLPPHYHTTNGLPPHLNGTLHKALKMSKPNFSKILQNLKPDLVIYDFLQPWAEEVVAELNIPAVHILTSGAALFAYFFNFLKRPNVEFPFPAINLSKVEQVKMREMFEKEPDDEDRLAPGNGDIMIINTSREIEAKYLDYCSELSNVKVVPVGPPFQDPITNDADDKELIEWLGKKDENSVVYVSFGSEYFLSKEDMEEMAHGLELSNVNFIWVVRFPKGEEMNLEDVLPKGFLERIKDRGMVVEHFAPQPRILAHPSTGGFISHCGWNSVMESIVFGVPIIAMPMQWDQPINAKLIVELGVAVEIRRDEDGKIHREEIARALKKVITGETGRILRKKVRDISKNLKSEREEEMNAYVEELIQLCRNSNKYK

SEQ ID NO: 838 - protein, 440 aa, Artificial Sequence
  engineered beta-1,2-glycosyltransferase encoded in plasmid pA29827
STLKVLMFPWLALGHINPFLNIAKQLADRGFDIYLCSTLINLDSIRKKIPHKYSLSIHLVELHLPEFPELPPHYHTTNGLPPHLNGTLKKALKMSKPNFSKILQNLKPDLVIYDFLQPWAEEVAAELNIPAVMILTSGAALFSYFFNFLKRPSVEFPFPAIYLSKVEQVKMREMFEKEPDEEDRLAPGNSDIMLMCTSREIEAKYLDYCTELSNVKVVPVGPPFQDPITNDADDKELIEWLDKKDENSVVYVSFGSEYFLSREDMEEVAHGLELSNVNFIWVARFPKGEEQNLEDVLPKGFLERIKDRGRVVDHFAPQPRILAHPSVGGFISHCGWNSVMESLYFGVPIIAMPMQWDQPINAKLIVELGVAVEIRRDEDGKIHREEIAEVIKKVITGETGEDLRRKVREISKKLKSKGEEEMQEAAEELIQLCRNSNKYK

SEQ ID NO: 839 - protein, 440 aa, Artificial Sequence
  engineered beta-1,2-glycosyltransferase encoded in plasmid pA29828
STLKVLMFPWLALGHINPFLNIAKQLADRGFLIYLVSTLINLESIIKKIPHKYSESIHLVELHLPELPELPPHYHTTNGLPPHLNGTLHKALKMAKPNFSKILQNLKPDLVIYDFLQPWAEEVAAELNIPAVHLLTSGAALFAYFFNFLKRPKVEFPFPAINLSKVEQVKMREFFEKEPDDGDRFAPNNGDIMLMCTSREIEAKYLDYCTELYNVKVVPVGPPFQDPITNDADDKELIDWLDKKDENSVVYVSFGSEYFLSREDMEEVAHGLELSNVNFIWVMRFPKGEEQNLEDVLPKGFLERIKDRGRVVDHFAPQPRILNHPSLGGFISHCGWNSVMESIHFGVPIIAMPMQWDQPINARLLVELGVAVEIRRDEDGRIHREEIAETLKKVITGETGRELRKKARDISKKLKSKSEEEMNEYAEELIQLCRNSNKYK

SEQ ID NO: 840 - protein, 440 aa, Artificial Sequence
  engineered beta-1,2-glycosyltransferase encoded in plasmid pA29829
STLKVLMFPWLALGHINPFLNLAKQLADRGFLIYLCSTLINLESIKKKIPEPYSKKIHLVELHLPQLPELPPHYHTTNGLPPHLNGTLKKALKMSKPNFSKILQNLKPDLVIYDFLQPWAEKVAAEQNIPAVFILTSGAALFSYFFNFLKRPKVEFPFPAINLSKVEQVKMREMFEKEPDEKDRLAPNNGDIMLMCTSREIEAKYLDYCTELSNVKVVPVGPPFQDPITNDADDKELIKWLDKKDENSVVYVSFGSEYFLSKEDMEEMAHGLELSNVNFIWVVRFPKGEEQNLEDALPKGFLERIGDRGRVVEHFAPQPRILNHPSVGGFISHCGWNSVMESIAFGVPIIAMPMQWDQPINARLLVELGVAVEIRRDEDGKIHREEIAETIKKVITGETGRILRKKVRDISKNLKSKREEEMNEAAEELIQLCRNSNKYK

SEQ ID NO: 841 - protein, 440 aa, Artificial Sequence
  engineered beta-1,2-glycosyltransferase encoded in plasmid pA29830
STLKVLMFPWLALGHINPFLNLAKQLADRGFLIYLCSTLINLESIKKKIPEPYSKKIHLVELHLPQLPELPPHYHTTNGLPPHLNGTLKKALKMSKPNFSKILQNLKPDLVIYDFLQPWAEKVAAEQNIPAVFILTSGAALFSYFFNFLKRPLVEFPFPAINLSKVEQVKMREMFEKEPDEKDRLAPNNGDIMLMCTSREIEAKYLDYCTELSNVKVVPVGPPFQDPITNDADDKELIKWLDKKDENSVVYVSFGSEYFLSKEDMEEMAHGLELSNVNFIWVVRFPKGEEQNLEDALPKGFLERIGDRGRVVEHFAPQPRILNHPSVGGFISHCGWNSVMESIAFGVPIIAMPMQWDQPINARLLVELGVAVEIRRDEDGKIHREEIAETIKKVITGETGRILRKKVRDISKNLKSKREEEMNEAAEELIQLCRNSNKYK

SEQ ID NO: 842 - protein, 440 aa, Artificial Sequence
  engineered beta-1,2-glycosyltransferase encoded in plasmid pA29831
STLKVLMFPWLALGHINPFLNIAKQLADRGFHIYLCSTLINLKSIIKKIPEKYSESIHLVELHLPELPKLPPHYHTTNGLPPHLNGTLKKALKMSKPNFSKILQNLKPDLVIYDFLQPWAEEVAAELNIPAVHILTSGAALFSYFFNFLKRPNVEFPFPAIYLSRVEQKKMREMFEKEPDDEDRLFPSNGDIMLMCTSREIEAKYLDYCSELSGVKVVPVGPPFQDPITNDADDKELIEWLNKKDENSVVYVSFGSEYFLSREDMEELAHGLELSNVNFIWVARFPKGEEMNLEDVLPKGFLERIGDRGRVVEHFAPQPRILNHPSTGGFISHCGWNSVMESIAFGVPIIAMPMQWDQPINARLIVELGVAVEIRRDEDGKIHREEIAETLKKVITGETGEILRRKVRDISKKLKSKRDEEMNEAAEELIQLCRNSNKYK

SEQ ID NO: 843 - protein, 440 aa, Artificial Sequence
  engineered beta-1,2-glycosyltransferase encoded in plasmid pA29832
STLKVLMFPWLALGHINPFLNIAKQLADRGFLIYLCSTLINLESIIKKIPHKYSESIHLVELHLPELPELPPHYHTTNGLPPHLNGTLHKALKMSKPNFSKILQNLKPDLVIYDFLQPWAEEVAAELNIPAVHLLTSGAALFAYFFNFLKRPKVEFPFPAINLSKVEQVKMREFFEKEPDDGDRFAPNNGDIMLMCTSREIEAKYLDYCTELYNVKVVPVGPPFQDPITNDADDKELIDWLDKKDENSVVYVSFGSEYFLSREDMEEVAHGLELSNVNFIWVMRFPKGEEQNLEDVLPKGFLERIKDRGRVVDHFAPQPRILNHPSLGGFISHCGWNSVMESIHFGVPIIAMPMQWDQPINARLLVELGVAVEIRRDEDGRIHREEIAETLKRVITGETGRELRKKARDISKKLKSKSEEEMNEYAEELIQLCRNSNKYK

SEQ ID NO: 844 - protein, 440 aa, Artificial Sequence
  engineered beta-1,2-glycosyltransferase encoded in plasmid pA29833
STLKVLMFPWLALGHINPFLNIAKQLADRGFHIYLCSTLINLKSIIKKIPEKYSESIHLVELHLPELPKLPPHYHTTNGLPPHLNGTLKKALKMSKPNFSKILQNLKPDLVIYDFLQPWAEEVAAELNIPAVHILTSGAALFSYFFNFLKRPLVEFPFPAIYLSKVEQKKMREMFEKEPDDEDRLAPSNGDIMLMCTSREIEAKYLDYCSELSGVKVVPVGPPFQDPITNDADDKELIEWLNKKDENSVVYVSFGSEYFLSREDMEELAHGLELSNVNFIWVARFPKGEEMNLEDVLPKGFLERIGDRGRVVEHFAPQPRILNHPSTGGFISHCGWNSVMESIAFGVPIIAMPMQWDQPINARLIVELGVAVEIRRDEDGKIHREEIAETLKKVITGETGEILRRKVRDISKKLKSKRDEEMNEAAEELIQLCRNSNKYK

SEQ ID NO: 845 - protein, 440 aa, Artificial Sequence
  engineered beta-1,2-glycosyltransferase encoded in plasmid pA29834
STLKVLMFPWLALGHINPFLNLAKQLADRGFLIYLCSTLINLESIKKKIPEKYSESIHLVELHLPELPELPPHYHTTNGLPPHLNGTLKKALKMSKPNFSKILQNLKPDLVIYDFLQPWAEEVAAELNIPAVFILTSGAALFSYFFNFLKRPTVEFPFPAIYLSKVEQVKMRRMFEKEPDEGDRLAPGNGDIVLMCTSREIEAKYLDYCSELSNVKVVPVGPPFQDPITNDADDKELIEWLNKKDPNSVVYVSFGSEYFLSREDMEEVAHGLELSNVNFIWVARFPKGEEQNLEDVLPKGFLERIKDRGRVVEHFAPQPRILNHPSTGGFISHCGWNSVMESIDFGVPIIAMPMQWDQPINAKLIVELGVAVEIRRDEDGRFHREEIAEVLKRVITGETGRELRKKVRDISENLKSGRDEEMNAAAEELIQLCRNSNKYK

SEQ ID NO: 846 - protein, 440 aa, Artificial Sequence
  engineered beta-1,2-glycosyltransferase encoded in plasmid pA29835
STLKVLMFPWLALGHINPFLNIAKQLADRGFLIYLCSTLINLESIIKKIPHKYSESIHLVELHLPELPELPPHYHTTNGLPPHLNGTLHKALKMSKPNFSKILQNLKPDLVIYDFLQPWAEEVAAELNIPAVHLLTSGAALFAYFFNFLKRPKVEFPFPAINLSKVEQVKMREMFEKEPDDGDRFAPNNGDIMLMCTSREIEAKYLDYCTELYNVKVVPVGPPFQDPITNDADDKELIDWLDKKDENSVVYVSFGSEYFLSREDMEEVAHGLELSNVNFIWVVRFPKGEEQNLEDVLPKGFLERIKDRGRVVDHFAPQPRILNHPSLGGFISHCGWNSVMESIHFGVPIIAMPMQWDQPINARLLVELGVAVEIRRDEDGRIHREEIAETLKKVITGETGRELRKKARDISKKLKSKSEEEMNEYAEELIQLCRNSNKYK

SEQ ID NO: 847 - protein, 440 aa, Artificial Sequence
  engineered beta-1,2-glycosyltransferase encoded in plasmid pA29836
STLKVLMFPWLALGHINPFLNLAKKLADRGFLIYLCSTHINLESIIKKIPEKYSESIKLVELHLPELPELPPHYHTTNGLPPHLNGTLKKALKMSKPNFSKILQNLKPDLVIYDFLQPWAEEVANELNIPAVMILTSGAALFSYFFNFLKRPNVEFPFPAINLSKVEQVKMRRMFETEPDEEDRLAFGNGTIMLMCTSREIEAKYLDYCSELSGVKVVPVGPPFQDPITNDADDKELIKWLGKKDENSVVYVSFGSEYFLSREDMEEMAHGLELSNVNFIWVARFPKGEEQNLEDVLPKGFLERIGDRGRVVDHFAPQPRILNHPSTGGFISHCGWNSVMESIYFGVPIIAMPMQWDQPINARLIVELGVAVEIRRDDDGKIHREEIAETIKKVITGETGEILRAKVRDISKKLRSEREEEMNKAVEELIQLCRNSNKYK

SEQ ID NO: 848 - protein, 440 aa, Artificial Sequence
  engineered beta-1,2-glycosyltransferase encoded in plasmid pA29837
STLKVLMFPWLALGHINPFLNLAKQLARRGFMIYLCSTLINLESIIKKIPEKYSESIHLVELHLPELPILPPHYHTTNGLPPHLNGTLHKALKMSKPNFSKILQNLKPDLVIYDFLQPWAEEVVNELNIPAVHILTSGAALFSYFFNFLKRPNVEFPFPAINLSKVEQVKMREMFEKEPDDEDRLAPGNGDIMIICTSREIEAKYLDYCSELSNVKVVPVGPPFQDPITNDADDKELIDWLGKKDENSVVYVSFGSEYFLSKEDMEEVAHGLELSNVNFIWVVRFPKGEEVNLEDVLPKGFLERIGDRGRVVEHFAPQPRILAHPSTGGFISHCGWNSVMESIVFGVPIIAMPMQWDQPINAKLIVELGVAVEIRRDDDGKIHREEVAETLKKVITGETGRILRKKVRDISKNLKSEREEEMNAAVEELIQLCRNSNKYK

SEQ ID NO: 849 - protein, 440 aa, Artificial Sequence
  engineered beta-1,2-glycosyltransferase encoded in plasmid pA29838
STLKVLMFPWLALGHINPFLNLAKQLADRGFLIYLCSTHINLESIKKKIPEKYSESIHLVELHLPYLPELPPHYHTTNGLPPHLNGTLKKALKMSKPNFSKILQNLKPDLVIYDFLQPWAEEVANEQNIPAVFILTSGAALFSYFFNFLKRPLVEFPFPAINLRKIEQVKMREMFEKEPDEEDRLAPGNGDIMLMCTSREIEAKYLDYCSELSNVKVVPVGPPFQDPITNDADDKELIEWLGKKDENSVVYVSFGSEYFLSREDMEEMAHGLELSNVNFIWVARFPKGEEINVEDALPKGFLERIGDRGIVVDHFAPQPRILNHPSVGGFISHCGWNSVMESIDFGVPIIAMPMQWDQPINARLIVELGVAVEIRRDDDGRIHREEIAETLKKVITGETGRILRKKVRDISKNLKSKREEEMNAAAEELIQLCRNSNKYK

SEQ ID NO: 850 - protein, 440 aa, Artificial Sequence
  engineered beta-1,2-glycosyltransferase encoded in plasmid pA29839
STLKVLMFPWLALGHINPFLNLAKQLARRGFLIYLCSTLINLESIIKKIPEKYSESIHLVELHLPELPILPPHYHTTNGLPPHLNGTLHKALKMSKPNFSKILQNLKPDLVIYDFLQPWAEEVVNELNIPAVMILTSGAALFSYFFNFLKRPNVEFPFPAINLSKVEQVKMREMFEKEPDDEDRLAPGNGDIMIICTSREIEAKYLDYCSELSNVKVVPVGPPFQDPITNDADDKELIDWLGKKDENSVVYVSFGSEYFLSKEDMEEVAHGLELSNVNFIWVVRFPKGEEVNLEDVLPKGFLERIGDRGRVVEHFAPQPRILAHPSTGGFISHCGWNSVMESIQFGVPIIAMPMQWDQPINAKLIVELGVAVEIRRDDDGKIHREEVAETLKKVITGETGRILRKKVRDISKNLKSEREEEMNAAVEELIQLCRNSNKYK

SEQ ID NO: 851 - protein, 440 aa, Artificial Sequence
  engineered beta-1,2-glycosyltransferase encoded in plasmid pA29840
STLKVLMFPWLALGHINPFLNLAKQLADRGFLIYLCSTHINLESIKKKIPEKYSESIHLVELHLPYLPELPPHYHTTNGLPPHLNGTLKKALKMSKPNFSKILQNLKPDLVIYDFLQPWAEEVANEQNIPAVFILTSGAALFSYFFNFLKRPLVEFPFPAINLRKIEQVKMREMFEKEPDEEDRLAPGNGDIMLMCTSREIEAKYLDYCSELSNVKVVPVGPPFQDPITNDADDKELIEWLGKKDENSVVYVSFGSEYFLSREDMEEMAHGLELSNVNFIWVARFPKGEEINLEDALPKGFLERIGDRGIVVDHFAPQPRILNHPSVGGFISHCGWNSVMESIDFGVPIIAMPMQWDQPINARLIVELGVAVEIRRDDDGRIHREEIAETLKKVITGETGRILRKKVRDISKNLKSKREEEMNAAAEELIQLCRNSNKYK

SEQ ID NO: 852 - protein, 440 aa, Artificial Sequence
  engineered beta-1,2-glycosyltransferase encoded in plasmid pA29841
STLKVLMFPWLALGHINPFLNLAKQLADRGFLIYLCSTHINLESIKKKIPEKYSESIHLVELHLPQLPELPPHYHTTNGLPPHLNGTLKKALKMSKPNFSKILQNLKPDLVIYDFLQPWAEEVANEQNIPAVFILTSGAALFSYFFNFLKRPNVEFPFPAINLSKVEQVKMREMFEKEPDEGDRLAPGNGDIMLMCTSREIEAKYLDYCTELSNVKVVPVGPPFQDPITNDADDKELIDWLNKKDENSVVYVSFGSEYFLSREDMEEVAHGLELSNVNFIWVVRFPKGEEQNLEDVLPKGFLERIGDRGRVVDHFAPQPRILSHPSVGGFISHCGWNSVMESIWFGVPIIAMPMQWDQPINAKLLVELGVAVEIRRDDDGKIHREEIAETLKKVITGETGEILRRKVRDISKNLKSEREEEMNRAAEELLQLCRNSNKYK

SEQ ID NO: 853 - protein, 440 aa, Artificial Sequence
  engineered beta-1,2-glycosyltransferase encoded in plasmid pA29842
STLKVLMFPWLALGHINPFLNIAKQLADRGFLIYLCSTLINLESIKKKIPDKYSESIHLVELHLPELPELPPHYHTTNGLPPHLNGTLKKALKMSKPNFSKILQNLKPDLVIYDFLQPWAEEVANELNIPAVFILTSGAALFSYFFHFLKRPTVEFPFPAINLSKVEQVKMREMFEKEPDEEDRLAPGNGDIMLMCTSREIEAKYLDYCSELSNVKVVPVGPPFQDPITNDADDKELIDWLNKKDENSVVYVSFGSEYFLSREDMEEVAHGLELSNVNFIWVARFPKGEETNLEDVLPKGFLERIGDRGRVVDHFAPQPRILNHPSIGGFISHCGWNSVMESIAFGVPIIAMPMQWDQPINARLIVELGVAVEIRRDDDGKIHREEIAETLKKVITGETGQILRKKVREISKNLKSKREEEMNAAVEELIQLCRNSNKYK

SEQ ID NO: 854 - protein, 440 aa, Artificial Sequence
  engineered beta-1,2-glycosyltransferase encoded in plasmid pA29843
STLKVLMFPWLALGHINPFLNIAKQLADRGFLIYLCSTLINLESIIKKIPEKYSESIHLVELHLPELPKLPPHYHTTNGLPPHLNGTLKKALKMSKPNFSKILQNLKPDLVIYDFLQPWAEEVANELNIPAVFILTSGAALFSYFFNFLKRPLVEFPFPAIYLSKVEQVKMREMFEKEPDDEDRLAPGNGDIMLMCTSREIEAKYLDYCSELSNVKVVPVGPPFQDPITNDADDKELIEWLDKKDENSVVYVSFGSEYFLSREDFEEVAHGLELSNVNFIWVARFPKGEEQNLEDVLPKGFLERIGDRGRVVEHFAPQPRILNHPSVGGFISHCGWNSVMESIAFGVPIIAMPMQWDQPINAKLIVELGVAVEIRRDDDGKIHREEIAETLKKVITGETGEILRRKVRDISKKLKSKRDEEMNAAAEELIQLCRNSNKYK

SEQ ID NO: 855 - protein, 440 aa, Artificial Sequence
  engineered beta-1,2-glycosyltransferase encoded in plasmid pA29844
STLKVLMFPWLALGHINPFLNIAKQLADRGFDIYLCSTLINLESIRKKIPHKYSESIHLVELHLPELPELPPHYHTTNGLPPHLNGTLKKALKMSKPNFSKILQNLKPDLVIYDFLQPWAEEVANELNIPAVFILTSGAALFSYFFNFLKRPSVEFPFPAIYLSKVEQVKMREMFEKEPDEEDRLAPGNGDIMLMCTSREIEAKYLDYCTELSNVKVVPVGPPFQDPITNDADDKELIDWLDKKDENSVVYVSFGSEYFLSREDMEEVAHGLELSNVNFIWVARFPKGEEQNLEDVLPKGFLERIGDRGRVVDHFAPQPRILAHPSVGGFISHCGWNSVMESLYFGVPIIAMPMQWDQPINAKLIVELGVAVEIVRDDDGKIHREEIAETLKKVITGETGEILRKKVREISKNLKSKGEEEMQAAAEELIQLCRNSNKYK

SEQ ID NO: 856 - protein, 440 aa, Artificial Sequence
  engineered beta-1,2-glycosyltransferase encoded in plasmid pA29845
STLKVLMFPWLALGHINPFLNLAKQLADRGFLIYLCSTLINLESIKKKIPEKYSESIHLVELHLPELPELPPHYHTTNGLPPHLNGTLKKALKMSKPNFSKILQNLKPDLVIYDFLQPWAEEVANEQNIPAVFILTSGAALFSYFFNFLKRPKVEFPFPAINLSKVEQVKMREMFEKEPDEEDRLAPGNGDIMLMCTSREIEAKYLDYCTELSNVKVVPVGPPFQDPITNDADDKELIKWLDKKDENSVVYVSFGSEYFLSKEDMEEVAHGLELSNVNFIWVARFPKGEEQNLEDVLPKGFLERIGDRGRVVEHFAPQPRILNHPSVGGFISHCGWNSVMESIAFGVPIIAMPMQWDQPINARLIVELGVAVEIRRDDDGKIHREEIAETLKKVITGETGRILRKKVRDISKNLKSKREEEMNEAAEELIQLCRNSNKYK

SEQ ID NO: 857 - protein, 440 aa, Artificial Sequence
  engineered beta-1,2-glycosyltransferase encoded in plasmid pA29846
STLKVLMFPWLALGHINPFLNIAKQLADRGFLIYLCSTLINLESIIKKIPEKYSESIHLVELHLPELPKLPPHYHTTNGLPPHLNGTLKKALKMSKPNFSKILQNLKPDLVIYDFLQPWAEEVANELNIPAVFILTSGAALFSYFFNFLKRPLVEFPFPAIYLSKVEQVKMREMFEKEPDDEDRLAPGNGDIMLMCTSREIEAKYLDYCSELSNVKVVPVGPPFQDPITNDADDKELIEWLDKKDENSVVYVSFGSEYFLSREDMEEVAHGLELSNVNFIWVARFPKGEEQNLEDVLPKGFLERIGDRGRVVEHFAPQPRILNHPSVGGFISHCGWNSVMESIAFGVPIIAMPMQWDQPINAKLIVELGVAVEIRRDDDGKIHREEIAETLKKVITGETGEILRRKVRDISKKLKSKRDEEMNAAAEELIQLCRNSNKYK

SEQ ID NO: 858 - protein, 440 aa, Artificial Sequence
  engineered beta-1,2-glycosyltransferase encoded in plasmid pA29847
STLKVLMFPWLALGHINPFLNLAKQLARRGFLIYLCSTLINLESIIKKIPEKYSESIHLVELHLPELPELPPHYHTTNGLPPHLNGTLHKALKMSKPNFSKILQNLKPDLVIYDFLQPWAEEVVNEHNIPAVFILTSGAALFSYFFNFLKRPGVEFPFPAINLSKVEQVKMREMFEKEPDEEDRLAPGNGDIMVICTSREIEAKYLDYCSELSNVKVVPVGPPFQDPITNDADDKELIDWLGTKDENSVVYVSFGSEYFLSKEDMEEVAHGLELSNVNFIWVVRFPKGEEVNLEDVLPKGFLERIGDRGRVVEHFAPQPRILAHPSTGGFISHCGWNSVMESIQFGVPIIAMPMQWDQPINAKLIVELGVAVEIVRDDDGKIHREEVAETLKQVITGETGEILRKKVRDISKNLKSEREEEMNAYVEELIQLCRNSNKYK

SEQ ID NO: 859 - protein, 440 aa, Artificial Sequence
  engineered beta-1,2-glycosyltransferase encoded in plasmid pA29848
STLKVLMFPWLALGHINPFLNLAKQLADRGFLIYLCSTLINLESIKKKIPEKYSESIHLVELHLPELPELPPHYHTTNGLPPHLNGTLHKALKMSKPNFSKILQNLKPDLVIYDFLQPWAEEVVNELNIPAVFILTSGAALFSYFFNFLKRPTVEFPFPAIYLSKVEQVKMRRMFEKEPDEGDRIAPGNGDIMLMCTSREIEAKYLDYCSELSNVKVVPVGPPFQDPITNDADDKELIDWLNKKDENSVVYVSFGSEYFLSREDMEEVAHGLELSNVNFIWVARFPKGEEQNLEDVLPKGFLERIGDRGRVVEHFAPQPRILNHPSTGGFISHCGWNSVMESIDFGVPIIAMPMQWDQPINAKLIVELGVAVEMVRDDDGNIHREEIAEVLKKVITGETGRILRKKVRDISKNLKSGREEEMNAAAEELIQLCRNSNKYK

SEQ ID NO: 860 - protein, 440 aa, Artificial Sequence
  engineered beta-1,2-glycosyltransferase encoded in plasmid pA29849
STLKVLMFPWLALGHINPFLNLAKQLADRGFLIYLCSTLINLESIIKKIPEKYSESIHLVELHLPELPILPPHYHTTNGLPPHLNGTLHKALKMSKPNFSKILQNLKPDLVIYDFLQPWAEEVVNEHNIPAVFILTSGAALFSYFFNFLKRPGVEFPFPAINLSKVEQVKMREMFEKEPDEEDRLAPGNGDIMVICTSREIEAKYLDYCSELSNVKVVPVGPPFQDPITNDADDKELIDWLGTKDENSVVYVSFGSEYFLSKEDMEEVAHGLELSNVNFIWVVRFPKGEEQNLEDVLPKGFLERIGDRGRVVEHFAPQPRILAHPSTGGFISHCGWNSVMESIQFGVPIIAMPMQWDQPINAKLIVELGVAVEIVRDDDGKIHREEIAETLKQVITGETGEILRKKVRDISKNLKSEREEEMNAYVEELIQLCRNSNKYK

SEQ ID NO: 861 - protein, 440 aa, Artificial Sequence
  engineered beta-1,2-glycosyltransferase encoded in plasmid pA29850
STLKVLMFPWLALGHINPFLNIAKQLADRGFLIYLVSTLINLESIIKKIPEKYSESIHLVELHLPELPELPPHYHTTNGLPPHLNGTLHKALKMAKPNFSKILQNLKPDLVIYDFLQPWAEEVANEQNIPAVHILTSGAALFSYFFNFLKRPKVEFPFPAINLSKVEQVKMREMFEKEPDEEDRLAPGNGDIMLMCTSREIEAKYLDYCTELSNVKVVPVGPPFQDPITNDADDKELIDWLNKKDENSVVYVSFGSEYFLSREDMEEVAHGLELSNVNFIWVVRFPKGEEQNLEDVLPKGFLERIGDRGRVVDHFAPQPRILNHPSLGGFISHCGWNSVMESIHFGVPIIAMPMQWDQPINARLLVELGVAVEIRRDDDGRIHREEIAETLKKVITGETGRILRKKVRDISKNLKSKREEEMNAAAEELIQLCRNSNKYK

SEQ ID NO: 862 - protein, 440 aa, Artificial Sequence
  engineered beta-1,2-glycosyltransferase encoded in plasmid pA29851
STLKVLMFPWLALGHINPFLNLAKQLADRGFLIYLCSTLINLESIKKKIPEKYSESIHLVELHLPELPELPPHYHTTNGLPPHLNGTLHKALKMSKPNFSKILQNLKPDLVIYDFLQPWAEEVVNELNIPAVFILTSGAALFSYFFNFLKRPTVEFPFPAIYLSKVEQVKMRRMFEKEPDEGDRIAPGNGDIMLMCTSREIEAKYLDYCSELSNVKVVPVGPPFQDPITNDADDKELIDWLNKKDENSVVYVSFGSEYFLSREDMEEVAHGLELSNVNFIWVARFPKGEEQNLEDVLPKGFLERIGDRGRVVEHFAPQPRILNHPSTGGFISHCGWNSVMESIDFGVPIIAMPMQWDQPINAKLIVELGVAVEIVRDDDGNIHREEIAEVLKKVITGETGRILRKKVRDISKNLKSGREEEMNAAAEELIQLCRNSNKYK

SEQ ID NO: 863 - protein, 440 aa, Artificial Sequence
  engineered beta-1,2-glycosyltransferase encoded in plasmid pA29852
STLKVLMFPWLALGHINPFLNLAKQLARRGFLIYLCSTLINLESIIKKIPEKYSESIHLVELHLPELPILPPHYHTTNGLPPHLNGTLHKALKMSKPNFSKILQNLKPDLVIYDFLQPWAEKVVNEHNIPAVFILTSGAALFSYFFNFLKRPGVEFPFPAINLSKVEQVKMREMFEKEPDEEDRLAPGNGDIMVICTSREIEAKYLDYCTELSNVKVVPVGPPFQDPITNDADDKELIDWLGTKDENSVVYVSFGSEYFLSKEDMEEVAFGLELSNVNFIWVVRFPKGEEVNLEDVLPKGFLERIGDRGRVVEHFAPQPRILNHPSTGGFISHCGWNSVMESIQFGVPIIAMPMQWDQPINAKLIVELGVAVEIVRDDDGKIHREEVAETLKQVITGETGEILRKKVRDISKNLKSEREEEMNAAVEELIQLCRNSNKYK

SEQ ID NO: 864 - protein, 440 aa, Artificial Sequence
  engineered beta-1,2-glycosyltransferase encoded in plasmid pA29853
STLKVLMFPWLALGHINPFLNLAKQLADRGFLIYLCSTLINLESIKKKIPEKYSESIHLVELHLPELPELPPHYHTTNGLPPHLNGTLHKALKMSKPNFSKILQNLKPDLVIYDFLQPWAEEVVNELNIPAVFILTSGAALFSYFFNFLKRPTVEFPFPAIYLSKVEQVKMRRMFEKEPDEGDRLAPGNGDIMLMCTSREIEAKYLDYCSELSNVKVVPVGPPFQDPITNDADDKELIDWLNKKDENSVVYVSFGSEYFLSREDMEEVAHGLELSNVNFIWVARFPKGEEQNLEDVLPKGFLERIGDRGRVVEHFAPQPRILNHPSTGGFISHCGWNSVMESIDFGVPIIAMPMQWDQPINAKLIVELGVAVEIVRDDDGNIHREEIAEVLKKVITGETGRILRKKVRDISKNLKSGREEEMNAAAEELIQLCRNSNKYK

SEQ ID NO: 865 - protein, 440 aa, Artificial Sequence
  engineered beta-1,2-glycosyltransferase encoded in plasmid pA29854
STLKVLMFPWLALGHINPFLNIAKQLADRGFLIYLCSTLINLESIIKKIPEKYSESIHLVELHLPELPELPPHYHTTNGLPPHLNGTLHKALKMAKPNFSKILQNLKPDLVIYDFLQPWAEEVANEQNIPAVHILTSGAALFSYFFNFLKRPKVEFPFPAINLSKVEQVKMREMFEKEPDEEDRLAPGNGDIMLMCTSREIEAKYLDYCTELSNVKVVPVGPPFQDPITNDADDKELIDWLNKKDENSVVYVSFGSEYFLSREDMEEVAHGLELSNVNFIWVVRFPKGEEQNLEDVLPKGFLERIGDRGRVVDHFAPQPRILNHPSLGGFISHCGWNSVMESIHFGVPIIAMPMQWDQPINARLLVELGVAVEIRRDDDGRIHREEIAETLKKVITGETGRILRKKVRDISKNLKSKREEEMNAAAEELIQLCRNSNKYK

SEQ ID NO: 866 - protein, 440 aa, Artificial Sequence
  engineered beta-1,2-glycosyltransferase encoded in plasmid pA29855
STLKVLMFPWLALGHINPFLNLAKQLADRGFLIYLCSTLINLESIIKKIPEKYSESIHLVELHLPELPILPPHYHTTNGLPPHLNGTLHKALKMSKPNFSKILQNLKPDLVIYDFLQPWAEKVVNEHNIPAVFILTSGAALFSYFFNFLKRPGVEFPFPAINLSKVEQVKMREMFEKEPDEEDRLAPGNCDIMVICTSREIEAKYLDYCTELSNVKVVPVGPPFQDPITNDADDKELIDWLGTKDENSVVYVSFGSEYFLSKEDMEEVAFGLELSNVNFIWVVRFPKGEEVNLEDVLPKGFLERIGDRGRVVEHFAPQPRILNHPSTGGFISHCGWNSVMESIQFGVPIIAMPMQWDQPINAKLIVELGVAVEIVRDDDGKIHREEVAETLKQVITGETGEILRKKVRDISKNLKSEREEEMNAAVEELIQLCRNSNKYK

SEQ ID NO: 867 - protein, 440 aa, Artificial Sequence
  engineered beta-1,2-glycosyltransferase encoded in plasmid pA29856
STLKVLMFPWLALGHINPFLNIAKQLADRGFLIYLCSTLINLESIIKKIPEKYSESIHLVELHLPELPELPPHYHTTNGLPPHLNGTLHKALKMSKPNFSKILQNLKPDLVIYDFLQPWAEEVANEQNIPAVHILTSGAALFSYFFNFLKRPKVEFPFPAINLSKVEQVKMREMFEKEPDEEDRLAPGNGDIMLMCTSREIEAKYLDYCTELSNVKVVPVGPPFQDPITNDADDKELIDWLNKKDENSVVYVSFGSEYFLSREDMEEVAHGLELSNVNFIWVVRFPKGEEQNLEDVLPKGFLERIGDRGRVVDHFAPQPRILNHPSLGGFISHCGWNSVMESIHFGVPIIAMPMQWDQPINARLLVELGVAVEIRRDDDGRIHREEIAETLKKVITGETGRILRKKVRDISKNLKSKREEEMNAAAEELIQLCRNSNKYK

SEQ ID NO: 868 - protein, 440 aa, Artificial Sequence
  engineered beta-1,2-glycosyltransferase encoded in plasmid pA29857
STLKVLMFPWLALGHINPFLNLAKQLADRGFYIYLCSTHINLESIKKKIPEKYSEKIHLVELHLPHLPELPPHYHTTNGLPPHLNGTLKKALKMSKPNFSKILQNLKPDLVIYDFLQPWAEEVANEQNIPAVFILTSGAALFAYFYNFLKRPGVEFPFPAINLRKIEQVKMREMFEKEPDEEDRLAPSNGDIMLMCTSREIERKYLDYCSELSGVKVVPVGPPFQDPITNDADDKELIEWLGKKDENSVVYVSFGSEYFLSKEDMEEMAHGLELSNVNFIWVARFPKGEETNLEDMLPKGFLERIGDRGRVVDHFAPQPRILSHPSVGGFISHCGWNSVMESIDFGVPIIAMPMQWDQPINARLIVELGVAVEIRRDEDGKIHREEIAETIKKVITGETGRELRKKVRDMSKKLKSKRDEEMNQAAEELIQLCRNSNKYK

SEQ ID NO: 869 - protein, 440 aa, Artificial Sequence
  engineered beta-1,2-glycosyltransferase encoded in plasmid pA29858
STLKVLMFPWLALGHINPFLNLAKQLADRGFYIYLCSTHINLESIKKKIPEKYSEKIHLVELHLPHLPELPPHYHTTNGLPPHLNGTLKKALKMSKPNFSKILQNLKPDLVIYDFLQPWAEEVANEQNIPAVFILTSGAALFAYFYNFLKRPGVEFPFPAINLRKIEQVKMREMFEKEPDEEDRLAPSNGDIMLMCTSREIERKYLDYCSELSGVKVVPVGPPFQDPITNDADDKELIEWLGKKDENSVVYVSFGSEYFLSKEDMEEMAHGLELSNVNFIWVARFPKGEETNLEDMLPKGFLERIGDRGIVVDHFAPQPRILSHPSVGGFISHCGWNSVMESIDFGVPIIAMPMQWDQPINARLIVELGVAVEIRRDEDGKIHREEIAETIKKVITGETGRELRKKVRDMSKKLKSKRDEEMNQAAEELIQLCRNSNKYK

SEQ ID NO: 870 - protein, 440 aa, Artificial Sequence
  engineered beta-1,2-glycosyltransferase encoded in plasmid pA29859
STLKVLMFPWLALGHINPFLNLAKQLADRGFYIYLCSTHINLESIKKKIPEKYSEKIHLVELHLPHLPELPPHYHTTNGLPPHLNGTLKKALKMSKPNFSKILQNLKPDLVIYDFLQPWAEEVANEQNIPAVFILTSGAALFAYFYNFLKRPLVEFPFPAINLRKIEQVKMREMFEKEPDEEDRLAPSNGDIMLMCTSREIERKYLDYCSELSGVKVVPVGPPFQDPITNDADDKELIEWLGKKDENSVVYVSFGSEYFLSKEDMEEMAHGLELSNVNFIWVARFPKGEETNLEDMLPKGFLERIGDRGRVVDHFAPQPRILSHPSVGGFISHCGWNSVMESIDFGVPIIAMPMQWDQPINARLIVELGVAVEIRRDEDGKIHREEIAETIKKVITGETGRELRKKVRDMSKKLKSKRDEEMNQAAEELIQLCRNSNKYK

SEQ ID NO: 871 - protein, 440 aa, Artificial Sequence
  engineered beta-1,2-glycosyltransferase encoded in plasmid pA29860
STLKVLMFPWLALGHINPFLNLAKKLADRGFLIYLCSTHINLESIIKKIPDKYSEQIKLVELHLPELPELPPHYHTTNGLPPHLNGTLKKALKMSKPNFSKILQNLKPDLVIYDFLQPWAAEVAAELNIPAVMILTSGAALFSYFFNFLKRPNVEFPFPAINLRKVEQVKMRRMFESEPDEEDRLAFGCSTIMLMCTSREIEAKYLDYCSELSGVKVVPVGPPFQDPITNDADDKELIKWLNKKDEKSVVYVSFGSEYFLSREDMEEMAHGLELSNVNFIWVARFPKGEEQNLEDVLPKGFLERIGDRGRVVEHFAPQPRILNHPSCGGFISHCGWNSVMESIYFGVPIIAMPMQWDQPINARLIVELGVAVEIRRDEDGKFHREEIAEVIKKVITGETGDELRAKVRDLSKKMRSKREEEMNEAVEELIQLCRNSNKYK

SEQ ID NO: 872 - protein, 440 aa, Artificial Sequence
  engineered beta-1,2-glycosyltransferase encoded in plasmid pA29861
STLKVLMFPWLALGHINPFLNIAKQLADRGFLIYLCSTLINLESIIKKIPHKYSESIHLVELHLPELPELPPHYHTTNGLPPHLNGTLHKALKMAKPNFSKILQNLKPDLVIYDFLQPWAEEVANEQNIPAVHLLTSGAALFAYFFNFLKRPKVEFPFPAINLSKVEQVKMREFFEKEPDDGDRFAPNNGDIMLMCTSREIEAKYLDYCTELSNVKVVPVGPPFQDPITNDADDKELIDWLDKKDENSVVYVSFGSEYFLSREDMEEVAHGLELSNVNFIWVMRFPKGEEQNLEDVLPKGFLERIKDRGRVVDHFAPQPRILNHPSLGGFISHCGWNSVMESIHFGVPIIAMPMQWDQPINARLLVELGVAVEIRRDEDGRIHREEIAETLKKVITGETGRELRKKARDISKKLKSKSEEEMNEYAEELIQLCRNSNKYK

SEQ ID NO: 873 - protein, 440 aa, Artificial Sequence
  engineered beta-1,2-glycosyltransferase encoded in plasmid pA29862
STLKVLMFPWLALGHINPFLNIAKQLADRGFLIYLCSTLINLESIIKKIPHKYSESIHLVELHLPELPELPPHYHTTNGLPPHLNGTLHKALKMAKPNFSKILQNLKPDLVIYDFLQPWAEEVANEQNIPAVHLLTSGAALFAYFFNFLKRPKVEFPFPAINLSKVEQVKMREFFEKEPDDGDRFAPNNGDIMLMCTSREIEAKYLDYCTELYNVKVVPVGPPFQDPITNDADDKELIDWLDKKDENSVVYVSFGSEYFLSREDMEEVAHGLELSNVNFIWVMRFPKGEEQNLEDVLPKGFLERIKDRGRVVDHFAPQPRILNHPSLGGFISHCGWNSVMESIHFGVPIIAMPMQWDQPINARLLVELGVAVEIRRDEDGRIHREEIAETLKKVITGETGRELRKKARDISKKLKSKSEEEMNEYAEELIQLCRNSNKYK

SEQ ID NO: 874 - protein, 440 aa, Artificial Sequence
  engineered beta-1,2-glycosyltransferase encoded in plasmid pA29863
STLKVLMFPWLALGHINPFLNIAKQLADRGFLIYLVSTLINLESIIKKIPHKYSESIHLVELHLPELPELPPHYHTTNGLPPHLNGTLHKALKMAKPNFSKILQNLKPDLVIYDFLQPWAEEVANEQNIPAVHLLTSGAALFAYFFNFLKRPKVEFPFPAINLSKVEQVKMREFFEKEPDDGDRFAPNNGDIMLMCTSREIEAKYLDYCTELYNVKVVPVGPPFQDPITNDADDKELIDWLDKKDENSVVYVSFGSEYFLSREDMEEVAHGLELSNVNFIWVMRFPKGEEQNLEDVLPKGFLERIKDRGRVVDHFAPQPRILNHPSLGGFISHCGWNSVMESIHFGVPIIAMPMQWDQPINARLLVELGVAVEIRRDEDGRIHREEIAETLKKVITGETGRELRKKARDISKKLKSKSEEEMNEYAEELIQLCRNSNKYK

SEQ ID NO: 875 - protein, 440 aa, Artificial Sequence
  engineered beta-1,2-glycosyltransferase encoded in plasmid pA29864
STLKVLMFPWLALGHINPFLNIAKQLADRGFDIYLCSTLINLDSIKKKIPHKYSQSIHLVELHLPEFPELPPHYHTTNGLPPHLNGTLKKALKMSKPNFSKILQNLKPDLVIYDFLQPWAEEVAAELNIPAVMILTSGAALFSYFFNFLKRPSVEFPFPAIYLSKVEQVKMREMFEKEPDEEDRLAPGNSDIMLMCTCREIEAKYLDYCTELSNVKVVPVGPPFQDPITNDADDKELIEWLDKKDENSVVYVSFGSEYFLSREDMEEVAHGLELSNVNFIWVARFPKGEEQNLEDVLPKGFLERIKDRGRVVDHFAPQPRILAHPSVGGFISHCGWNSVMESLHFGVPIIAMPMQWDQPINAKLIVELGVAVEIRRDEDGKIHREEIAEVIKKVITGETGEDLRRKVREISEKLKSKGEEEMQEAAEELIQLCRNSNKYK

SEQ ID NO: 876 - protein, 440 aa, Artificial Sequence
  engineered beta-1,2-glycosyltransferase encoded in plasmid pA29865
STLKVLMFPWLALGHINPFLNIAKQLADRGFDIYLCSTLINLDSIKKKIPHKYSQSIHLVELHLPEFPELPPHYHTTNGLPPHLNGTLKKALKMSKPNFSKILQNLKPDLVIYDFLQPWAEEVANEQNIPAVMILTSGAALFSYFFNFLKRPSVEFPFPAINLSKVEQVKMREMFEKEPDEEDRLAPGNSDIMLMCTSREIEAKYLDYCTELSNVKVVPVGPPFQDPITNDADDKELIEWLDKKDENSVVYVSFGSEYFLSREDMEEVAHGLELSNVNFIWVARFPKGEEQNLEDVLPKGFLERIKDRGRVVDHFAPQPRILAHPSVGGFISHCGWNSVMESLHFGVPIIAMPMQWDQPINAKLIVELGVAVEIRRDEDGKIHREEIAEVIKKVITGETGEDLRRKVREISEKLKSKGEEEMQEAAEELIQLCRNSNKYK

SEQ ID NO: 877 - protein, 440 aa, Artificial Sequence
  engineered beta-1,2-glycosyltransferase encoded in plasmid pA29866
STLKVLMFPWLALGHINPFLNIAKQLADRGFDIYLCSTLINLDSIKKKIPHKYSQSIHLVELHLPEFPELPPHYHTTNGLPPHLNGTLKKALKMSKPNFSKILQNLKPDLVIYDFLQPWAEEVANEQNIPAVMILTSGAALFSYFFNFLKRPGVEFPFPAINLSKVEQVKMREMFEKEPDEEDRLAPGNSDIMLMCTSREIEAKYLDYCTELSNVKVVPVGPPFQDPITNDADDKELIEWLDKKDENSVVYVSFGSEYFLSREDMEEVAHGLELSNVNFIWVARFPKGEEQNLEDVLPKGFLERIKDRGRVVDHFAPQPRILAHPSVGGFISHCGWNSVMESLHFGVPIIAMPMQWDQPINAKLIVELGVAVEIRRDEDGKIHREEIAEVIKKVITGETGEDLRRKVREISEKLKSKGEEEMQEAAEELIQLCRNSNKYK

SEQ ID NO: 878 - protein, 440 aa, Artificial Sequence
  engineered beta-1,2-glycosyltransferase encoded in plasmid pA29867
STLKVLMFPWLALGHINPFLNIAKQLADRGFLIYLCSTLINLESIIKKIPHKYSESIHLVELHLPELPELPPHYHTTNGLPPHLNGTLHKALKMSKPNFSKILQNLKPDLVIYDFLQPWAEEVANEQNIPAVHLLTSGAALFAYFFNFLKRPKVEFPFPAINLSKVEQVKMREFFEKEPDDGDRFAPNNGDIMLMCTSREIEAKYLDYCTELYNVKVVPVGPPFQDPITNDADDKELIDWLDKKDENSVVYVSFGSEYFLSREDMEEVAHGLELSNVNFIWVMRFPKGEEQNLEDVLPKGFLERIKDRGRVVDHFAPQPRILNHPSLGGFISHCGWNSVMESIHFGVPIIAMPMQWDQPINARLLVELGVAVEIRRDEDGRIHREEIAETLKRVITGETGRELRKKARDISKKLKSKSEEEMNEAAEELIQLCRNSNKYK

SEQ ID NO: 879 - protein, 440 aa, Artificial Sequence
  engineered beta-1,2-glycosyltransferase encoded in plasmid pA29868
STLKVLMFPWLALGHINPFLNIAKQLADRGFLIYLCSTLINLESIIKKIPHKYSESIHLVELHLPELPELPPHYHTTNGLPPHLNGTLHKALKMSKPNFSKILQNLKPDLVIYDFLQPWAEEVANEQNIPAVHLLTSGAALFAYFFNFLKRPKVEFPFPAINLSKVEQVKMREFFEKEPDDGDRFAPNNGDIMLMCTSREIEAKYLDYCTELYNVKVVPVGPPFQDPITNDADDKELIDWLDKKDENSVVYVSFGSEYFLSREDMEEVAHGLELSNVNFIWVMRFPKGEEQNLEDVLPKGFLERIKDRGRVVDHFAPQPRILNHPSLGGFISHCGWNSVMESIHFGVPIIAMPMQWDQPINARLLVELGVAVEIRRDEDGRIHREEIAETLKRVITGETGRELRKKARDISKKLKSKSEEEMNEYAEELIQLCRNSNKYK

SEQ ID NO: 880 - protein, 440 aa, Artificial Sequence
  engineered beta-1,2-glycosyltransferase encoded in plasmid pA29869
STLKVLMFPWLALGHINPFLNIAKQLADRGFLIYLCSTLINLESIIKKIPHKYSESIHLVELHLPELPELPPHYHTTNGLPPHLNGTLHKALKMSKPNFSKILQNLKPDLVIYDFLQPWAEEVAAEQNIPAVHLLTSGAALFAYFFNFLKRPKVEFPFPAINLSKVEQVKMREFFEKEPDDGDRFAPNNGDIMLMCTSREIEAKYLDYCTELYNVKVVPVGPPFQDPITNDADDKELIDWLDKKDENSVVYVSFGSEYFLSREDMEEVAHGLELSNVNFIWVMRFPKGEEQNLEDVLPKGFLERIKDRGRVVDHFAPQPRILNHPSLGGFISHCGWNSVMESIHFGVPIIAMPMQWDQPINARLLVELGVAVEIRRDEDGRIHREEIAETLKRVITGETGRELRKKARDISKKLKSKSEEEMNEYAEELIQLCRNSNKYK

SEQ ID NO: 881 - protein, 440 aa, Artificial Sequence
  engineered beta-1,2-glycosyltransferase encoded in plasmid pA29870
STLKVLMFPWLALGHINPFLNLAKKLADRGFLIYLCSTHINLESIIKKIPEKYSESIKLVELHLPELPELPPHYHTTNGLPPHLNGTLKKALKMSKPNFSKILQNLKPDLVIYDFLQPWAEEVANELNIPAVMILTSGAALFSYFFNFLKRPNVEFPFPAINLSKVEQVKMRRMFETEPDEEDRLAFGNGTIMLMCTSREIEAKYLDYCSELSGVKVVPVGPPFQDPITNDADDKELIKWLGKKDENSVVYVSFGSEYFLSREDMEEMAHGLELSNVNFIWVARFPKGEEQNLEDVLPKGFLERIGDRGRVVDHFAPQPRILNHPSCGGFISHCGWNSVMESIYFGVPIIAMPMQWDQPINARLIVELGVAVEIRRDDDGKIHREEIAETIKKVITGETGEILRAKVRDISKKLRSEREEEMNKAVEELIQLCRNSNKYK

SEQ ID NO: 882 - protein, 440 aa, Artificial Sequence
  engineered beta-1,2-glycosyltransferase encoded in plasmid pA29871
STLKVLMFPWLALGHINPFLNLAKQLARRGFMIYLCSTLINLESIIKKIPEKYSESIHLVELHLPELPILPPHYHTTNGLPPHLNGTLHKALKMSKPNFSKILQNLKPDLVIYDFLQPWAEEVVNELNIPAVHILTSGAALFSYFFNFLKRPNVEFPFPAINLSKVEQVKMREMFEKEPDDEDRLAPGNCDIMIICTSREIEAKYLDYCSELSNVKVVPVGPPFQDPITNDADDKELIDWLGKKDENSVVYVSFGSEYFLSKEDMEEVAHGLELSNVNFIWVVRFPKGEEVNLEDVLPKGFLERIGDRGRVVEHFAPQPRILAHPSTGGFISHCGWNSVMESIVFGVPIIAMPMQWDQPINAKLIVELGVAVEIRRDDDGKIHREEVAETLKKVITGETGRILRKKVRDISKNLKSEREEEMNAAVEELIQLCRNSNKYK

SEQ ID NO: 883 - protein, 808 aa, Arabidopsis thaliana
MANAERMITRVHSQRERLNETLVSERNEVLALLSRVEAKGKGILQQNQIIAEFEALPEQTRKKLEGGPFFDLLKSTQEAIVLPPWVALAVRPRPGVWEYLRVNLHALVVEELQPAEFLHFKEELVDGVKNGNFTLELDFEPFNASIPRPTLHKYIGNGVDFLNRHLSAKLFHDKESLLPLLKFLRLHSHQGKNLMLSEKIQNLNTLQHTLRKAEEYLAELKSETLYEEFEAKFEEIGLERGWGDNAERVLDMIRLLLDLLEAPDPCTLETFLGRVPMVFNVVILSPHGYFAQDNVLGYPDTGGQVVYILDQVRALEIEMLQRIKQQGLNIKPRILILTRLLPDAVGTTCGERLERVYDSEYCDILRVPFRTEKGIVRKWISRFEVWPYLETYTEDAAVELSKELNGKPDLIIGNYSDGNLVASLLAHKLGVTQCTIAHALEKTKYPDSDIYWKKLDDKYHFSCQFTADIFAMNHTDFIITSTFQEIAGSKETVGQYESHTAFTLPGLYRVVHGIDVFDPKFNIVSPGADMSIYFPYTEEKRRLTKFHSEIEELLYSDVENKEHLCVLKDKKKPILFTMARLDRVKNLSGLVEWYGKNTRLRELANLVVVGGDRRKESKDNEEKAEMKKMYDLIEEYKLNGQFRWISSQMDRVRNGELYRYICDTKGAFVQPALYEAFGLTVVEAMTCGLPTFATCKGGPAEIIVHGKSGFHIDPYHGDQAADTLADFFTKCKEDPSHWDEISKGGLQRIEEKYTWQIYSQRLLTLTGVYGFWKHVSNLDRLEARRYLEMFYALKYRPLAQAVPLAQDD

SEQ ID NO: 884 - protein, 806 aa, Coffea arabica
MAERVLTRVHSLRERLDATLAAHRNDVLLFMSRLETHGKGILKPHQLLAEFEEINKDGKQKIHDHAFEEVLKSTQEAIVLPPWVALAIRLRPGVWEYVRVNVHALVVEELTVPEYLHFKEELVDGSKNGNFVLELDFEPFTASFPKPTLTKYIGDGVEFLNRHLSAKMFHDKESMAPLLDFLRVHQYKGKTMMLNDRIKDLNTLQAVLRKAEEYLTTLSADTPYSEFEHKFQEIGLERGWGDTAERVLEMICMLLDLLGAPDSCTLEKFLGRIPMVFNVVILSPHGYFAQENVLGYPDTGGQVVYILDQVPALEREMLKRIKEQGLDVKPRILIITRLLPDAPGTTCGQRLEKVYGSEYSHILRVPFRTEKGVVRKWISRFEVWPYMETFTEDVAKEVTAELQAKPDLVIGNYSEGNLVASLLAHKLGVTQCTIAHALEKTKYPDSDIYLSKFDEKYHFSCQFTADLIAMNHTDFIITSTFQEIAGSKDTVGQYESHMAFTMPGLYRVVHGIDVFDPKFNIVSPGADTNLYFPHTEKEKRLTSFHPEIEELLFSDVENEEHLCVLKDKKKPILFTMARLDRVKNLTGLVELYAKNPKLRELVNLVVVGGDRRKESKDLEEQAEMKKMYSLIETYNLNGQFRWISSQMNRVRNGELYRYIADTRGAFVQPAFYEAFGLTVVEAMTCGLPTFATNHGGPAEIIIHGKSGFHIDPYHGEQVSELLANFFERCKKEPSYWDTISAGGLKRIQEKYTWQIYSDRLLTLAGVYGFWKCVSKLDRQEIRRYLEMFYALKYRKLAEAVPLAVDQ

SEQ ID NO: 885 - protein, 793 aa, Acidithiobacillus caldus
MIEALRQQLLDDPRSWYAFLRHLVASQRDSWLYTDLQRACADFREQLPEGYAEGIGPLEDFVAHTQEVIFRDPWMVFAWRPRPGRWIYVRIHREQLALEELSTDAYLQAKEGIVGLGAEGEAVLTVDFRDFRPVSRRLRDESTIGDGLTHLNRRLAGRIFSDLAAGRSQILEFLSLHRLDGQNLMLSNGNTDFDSLRQTVQYLGTLPRETPWAEIREDMRRRGFAPGWGNTAGRVRETMRLLMDLLDSPSPAALESFLDRIPMISRILIVSIHGWFAQDKVLGRPDTGGQVVYILDQARALEREMRNRLRQQGVDVEPRILIATRLIPESDGTTCDQRLEPVVGAENVQILRVPFRYPDGRIHPHWISRFKIWPWLERYAQDLEREVLAELGSRPDLIIGNYSDGNLVATLLSERLGVTQCNIAHALEKSKYLYSDLHWRDHEQDHHFACQFTADLIAMNAADIIVTSTYQEIAGNDREIGQYEGHQDYTLPGLYRVENGIDVFDSKFNIVSPGADPRFYFSYARTEERPSFLEPEIESLLFGREPGADRRGVLEDRQKPLLLSMARMDRIKNLSGLAELYGRSSRLRGLANLVIIGGHVDVGNSRDAEEREEIRRMHEIMDHYQLDGQLRWVGALLDKTVAGELYRVVADGRGVFVQPALFEAFGLTVIEAMSSGLPVFATRFGGPLEIIEDGVSGFHIDPNDHEATAERLADFLEAARERPKYWLEISDAALARVAERYTWERYAERLMTIARIFGFWRFVLDRESQVMERYLQMFRHLQWRPLAHAVPME

SEQ ID NO: 886 - protein, 794 aa, Nitrosomonas europaea
MTTIDTLATCTQQNRDAVYTLLRRYFTANRTLLLQSDLREGLLQTEQDCGQSDMLRAFVFRLQEGIFSSPWAYLALRPEIAKWEFMRIHQEHLIPEKLTISEFLKFKETVVKGEATESVLEVDFGPFNRGFPRLKESRSIGQGVIFLNRKLSSEMFSRIEAGHTSLLHFLGVHAIEGQQLMFSNNSHDIHAVRNQLRQALEMLETLDGTTPWIELAPKMNQLGFAPGWGHNANRVAETMNMLMDILEAPSPSALEEFLACIPMISRLLILSPHGYFGQDNVLGLPDTGGQVVYILDQVRALEKEMHDRLQLQGVQVEPKILIVTRLIPDAGDTTCNQRLEKVSGCTNTWILRVPFRKHNGEIIPHWISRFEIWPHLEIFAGDVEREALAELGGHPDLIIGNYSDGNLVATLLSRRLGVTQCNIAHALEKTKYLHSDIYWQENEDKYHFSCQYTADLLAMNSADFIVTSTYQEIAGTREAEGQYESYQAFSMPDLYRVIHGIDLFDPKFNIVSPGANADIYFPYSDPNRRLHSLIPEIESLIFDDATNLPARGYLQDPDKPLIFTMARLDRIKNITGLVELYAASPRLRSLANLVIVGGKIDPQHSSDHEEQEQIHRMHQLMDEHELDQQVRWLGMRLDKNLAGELYRYIADKRGIFVQPALFEAFGLTIIEAMASGLPTFATRYGGPLEIIQNNRSGFHIDPNQGAATADLIADFFEKNLENPQEWERISQGALDRVASRYTWKLYAERMMTLSRIYGFWKFVSGLEREETDRYLNMFYHLQFRPLANRLAHEI

SEQ ID NO: 887 - protein, 786 aa, Denitrovibrio acetiphilus
MNLSNKELEGLDEIISDHREDFCPFLGRIEEEDKQFFLSSEMKEMYAGDTVPDFIASLQEAVKMPGQIYFATRASIGEWAFVTVFTDTLDYMEVSPTEYQEAKEKTVLGENAAWMPSVDLKPFNRDFPKPSSADFIGKGVEFLNRHQSSRIFMNPEKGLKQLLDFLRVHKYDGRQLMLNNRIDSVDKLKKALKKAQALLKNKSDETEWEEVESDMAHLGFEPGWGKKLGYVKEFLALLSDILAAPEPVVLEKFLDRIPMIFSLVVLSPHGFFGQAGVFGKPDTGGQVVYILDQVKALEHELKSRLDEKGLDITPKILVVTRLIPEAEGTNCDMEEELIRGTDNCHIVRVPFRDESGEVVRQWISRFRIWPYLERFSTEAQNIILSKLQGNPDLIIGNYSDGNLVASLIAQRLGVTQCTIAHALEKTKYLYSDLYWQDNNDKYHFACQYTADLISMNYSDFIITSTYQEIAGTNDSVGQYESYMNYTLPGLYRVVNGIDVFDPKFNVVSPGAAPDIFFSYKSKDRFPEHIEEIESILFEDNLEGSRGSLADPDKPLIFTMARLDKIKNLTGLVRWFGENEELRKTANLLVIGGFVDESLSSDDEEREQIRIMHSVIDELGLDGSVRWVGAHLGKRMTGEFYRYVADRKGVFVQPALFEAFGLTIIEAMSSGLPVFATVYGGPSEIIEDGKSGFTLDPNKGDECAEKLLEFIQKCQSDPGHWIKISDNALKRVEERYNWPLYAKRLMTFARVYGFWKFVTNLEREETVRYLEMLYGMVYRRLADPKEY

SEQ ID NO: 888 - protein, 808 aa, Thermosynechococcus elongatus
MTCVLLKAVVESDERADLRQFSRILQLGEKRYLLRNDILDAFADYCRDQERPVPPPSESRLSKLVFYTQEIIVDNESLCWIVRPRIAQQEVCRLLVEDLTIVPMTIPELLDLRDRLVNHYHPNEGDVFEIDVQPFYDYSPIIRDAKNIGKGVEFLNRYLSSKLFQDPRQWQQNLFNFLRIHRYNGYQLLINERIRSPQHLSEQVKQALVVLSDRPPTEAYSEFRFELQNLGFEPGWGNTVARVRDTLEILDQLLDSPDHQVLEAFVSRIPMLFRIALISPHGWFGQEGVLGRPDTGGQVVYILDQVKSLEKQMREDLELAGLGVLEAQPKIIVLTRLIPNAEGTLCNQRLEKIYGTNDAWILRVPFREFNPKVTQNWISRFEIWPYLETFAIDAERELRAEFGHVPDLIIGNYSDGNLVAFLLARRLKVTQCNIAHALEKSKYLFSNLYWQDLEDKYHFSLQFTADLIAMNAANFIISSTYQEIVGTPDSIGQYESYQSFTMPDLYHVVNGIELFSPKFNVVPPGVNEQVYFPYYHYTERLEGDRQRLEELLFTLEDPQQIYGYLEAPEKRPLFSMARLDRIKNLTGLAEAFGRSKALQERCNLILVAGKLRTADSSDREEIAEIEKLYQIIHQYNLHGKIRWLGIRLPKADSGEIYRIIADRQGIFVQPALFEAFGLTILEAMISGLPTFGTRFGGPLEIIQDGVNGFYINPTHLEEMAETIVRFLEACDRDPQEWQRISKAGIERVYSTYTWKIHCTRLLSLAKIYGFWNFSSQENREDMMRYMEALFHLLYKPRAQALLAEHLQR

SEQ ID NO: 889 - protein, 816 aa, Oryza sativa
MGETTGERALTRLHSMRERIGDSLSAHTNELVAVFSRLVNQGKGMLQPHQIIAEYNAAIPEGEREKLKDSALEDVLRGAQEAIVIPPWIALAIRPRPGVWEYLRINVSQLGVEELSVPEYLQFKEQLVDGSTQNNFVLELDFEPFNASFPRPSLSKSIGNGVQFLNRHLSSKLFHDKESMYPLLNFLRAHNYKGMTMMLNDRIRSLDALQGALRKAEKHLAGITADTPYSEFHHRFQELGLEKGWGDCAQRVRETIHLLLDLLEAPEPSALEKFLGTIPMVFNVVILSPHGYFAQANVLGYPDTGGQVVYILDQVRAMENEMLLRIKQQGLNITPRILIVTRLLPDAHGTTCGQRLEKVLGTEHTHILRVPFRTENGTVRKWISRFEVWPYLETYTDDVAHEISGELQATPDLIIGNYSDGNLVACLLAHKLGVTHCTIAHALEKTKYPNSDLYWKKFEDHYHFSCQFTADLIAMNHADFIITSTFQEIAGNKETVGQYESHMAFTMPGLYRVVHGIDVFDPKFNIVSPGADMSIYFPFTESQKRLTSLHLEIEELLFSDVENTEHKFVLKDKKKPIIFSMARLDHVKNLTGLVELYGRNPRLQELVNLVVVCGDHGKESKDKEEQAEFKKMFNLIEQYNLNGHIRWISAQMNRVRNGELYRYICDMRGAFVQPALYEAFGLTVIEAMTCGLPTFATAYGGPAEIIVHGVSGYHIDPYQNDKASALLVEFFEKCQEDPNHWIKISQGGLQRIEEKYTWKLYSERLMTLSGVYGFWKYVTNLDRRETRRYLEMLYALKYRKMATTVPLAIEGEASTK

SEQ ID NO: 890 - protein, 808 aa, Artificial Sequence
  engineered sucrose synthase encoded in plasmid pA33240
MANAERMITRVHSQRERLNETLVSERNEVLALLSRIEQLGKGIYQQHQIIAEFEALPEQTEKKLLDGPFGDLLKSTQEAIVLPGWIALAVRPRPGVWEYLRVNVHALVVEELQPAEYLQFKEELVDGSTNGNFMLELDFEAFNASIPKPTLHKYIGNGVEFLNRHLSAKLFHDKESLLPLLEFLRLHSYQGKNLMLSEKIQNLNTLQHVLRKAEEYLATLPPETPYEEFEHKFQEIGLERGWGDNVERVLEMIRLLLDLLEAPDPCTLETFLGRIPMVFNVVILSPHGYFAQENVLGYPDTGGQVVYILDQVRALENEMLQRIKQQGLNIVPRILIITRLLPDAVGTTCGQRLERVYDSEYCHILRIPFRTEKGIVRKWISRFEVWPYLETFTEDVAKEISKELQGKPDLIIGNYSDGNLVASLLAHKLGVTQCTIAHALEKTKYPDSDIYWKKLDDKYHFSCQFTADLIAMNHADFIITSTFQEIAGSKDTVGQYESHIAFTLPGLYRVVHGIDVFDPKFNIVSPGADMSIYFPYTEEKRRLTKLHSEIEELLYSDVENKEHLGVLKDKKKPILFTMARLDRVKNLTGLVEWYARNPRLRELVNLVVVGGDRRKESKDNEEKAEMKKMYDLIEKYKLNGQFRWISAQMDRVRNGELYRYICDTKGAFVQPALYEAFGLTVVEAMTCGLPTFATCYGGPAEIIVHGKSGFHIDPYHGDQVAETLVEFFEKCKEDPSHWDEISKGALQRIEEKYTWQIYSQRLLTLTGVYGFWKYVTNLDRLEARRYLEMFYALKYRPLAQAVPLAQDD

SEQ ID NO: 891 - protein, 808 aa, Artificial Sequence
  engineered sucrose synthase encoded in plasmid pA33241
MANAERMITRVHSQRERLNETLVSERNEVLALLSRVEALGKGIYQQNQIIAEFEALPEQTEKKLLDGPFGDLLKSTQEAIVLPGWIALAVRPRPGVWEYLRVNIHALVVEELQPAEYLHFKEELVDGVTNGNFMLELDFEAFNASIPRPTLHKYIGNGVEFLNRHLSAKLFHDKESLLPLLEFLRLHSYQGKNLMLSEKIQNLNTLQHVLRKAEEYLATLPPETPYEEFEHKFQEIGLERGWGDNVERVLEMIRLLLDLLEAPDPCTLETFLGRIPMVFNVVILSPHGYFAQDNVLGYPDTGGQVVYILDQVRALENEMLQRIKQQGLNIVPRILIITRLLPDAVGTTCGQRLERVYDSEYCHILRVPFRTEKGIVRKWISRFEVWPYLETFTEDVAVELSKELNGKPDLIIGNYSDGNLVASLLAHKLGVTQCTIAHALEKTKYPDSDIYWKKLDDKYHFSCQFTADLIAMNHADFIITSTFQEIAGSKDTVGQYESHIAFTLPGLYRVVHGIDVFDPKFNIVSPGADMSIYFPYTEEKRRLTKLHSEIEELLYSDVENKEHLGVLKDKSKPILFTMARLDRVKNLTGLVEWYAKNPRLRELVNLVVVGGDRRKESKDNEEKAEMKKMYDLIEEYKLNGQFRWISAQMDRVRNGELYRYICDTKGAFVQPALYEAFGLTVVEAMTCGLPTFATCYGGPAEIIVHGKSGFHIDPYHGDQVADTLVDFFEKCKEDPSHWDEISKGALQRIEEKYTWQIYSQRLLTLTGVYGFWKYVSNLDRLEARRYLEMFYALKYRPLAQAVPLAQDD

SEQ ID NO: 892 - protein, 808 aa, Artificial Sequence
  engineered sucrose synthase encoded in plasmid pA33242
MANAERMITRVHSQRERLNETLVSERNEVLALLSRVERLGKGILQQNQIIAEFEALPEQTRKKLLGGPFGDLLKSTQEAIVLPGWVALAVRPRPGVWEYLRVNIHALVVEELQPAEYLHFKEELVDGVTNGNFMLELDFEAFNASIPKPTLHKYIGNGVEFLNRHLSAKLFHDKESLLPLLEFLRLHSYQGKNLMLSEKIQNLNTLQHVLRKAEEYLAELPPETPYEEFEHKFEEIGLERGWGDNVERVLEMIRLLLDLLEAPDPCTLETFLGRIPMVFNVVILSPHGYFAQDNVLGYPDTGGQVVYILDQVRALENEMLQRIKQQGLNIVPRILILTRLLPDAVGTTCGQRLERVYDSEYCHILRVPFRTEKGIVRKWISRFEVWPYLETYTEDVAVELSKELNGKPDLIIGNYSDGNLVASLLAHKLGVTQCTIAHALEKTKYPDSDIYWKKLDDKYHFSCQFTADLIAMNHADFIITSTFQEIAGSKETVGQYESHIAFTLPGLYRVVHGIDVFDPKFNIVSPGADMSIYFPYTEEKRRLTKLHSEIEELLYSDVENKEHLGVLKDKKKPILFTMARLDRVKNLTGLVEWYAKNPRLRELVNLVVVGGDRRKESKDNEEKAEMKKMYDLIEEYKLNGQFRWISAQMDRVRNGELYRYICDTKGAFVQPALYEAFGLTVVEAMTCGLPTFATCYGGPAEIIVHGKSGFHIDPYHGDQVADTLVEFFEKCKEDPSHWDEISKGALQRIEEKYTWQIYSQRLLTLTGVYGFWKYVSNLDRLEARRYLEMFYALKYRPLAQAVPLAQDD

SEQ ID NO: 893 - protein, 808 aa, Artificial Sequence
  engineered sucrose synthase encoded in plasmid pA33244
MANAERMITRVHSQRERLNETLVSERNEVLALLSRIEAKGKGILQQNQIIAEFEALPEQTRKKLLDGPFFDLLKSTQEAIVLPPWVALAVRPRPGVWEYLRVNLHDLVVEELQPAEFLHFKEELVDGVKNGNFTLELDFEAFNASIPRPTLHKYIGNGVDFLNRHLSAKLFHDKESLLPLLEFLRLHSHQGKNLMLSEKIQNLNTLQHVLRKAEEYLAELPPETLYEEFEAKFQEIGLERGWGDNAERVLDMIRLLLDLLEAPDPCTLETFLGRVPMVFNVVILSPHGYFAQDNVLGYPDTGGQVVYILDQVRALENEMLQRIKQQGLDIKPRILILTRLLPDAVGTTCGQRLERVYDTEYCHILRVPFRTEKGIVRKWISRFEVWPYLETFTEDAAKELSKELNGKPDLIIGNYSDGNLVASLLAHKLGVTQCTIAHALEKTKYPDSDIYWKKLDDKYHFSCQFTADLFAMNHADFIITSTFQEIAGSKDTVGQYESHTAFTLPGLYRVVHGIDVFDPKFNIVSPGADMSIYFPYTEEKRRLTKFHSEIEELLYSDVENKEHLGVLKDKSKPILFTMARLDRVKNLSGLVEWYGKNTRLRELVNLVVVGGDRRKESKDNEEKAEMKKMYDLIEEYKLNGQFRWISSQMDRVRNGELYRYICDTKGAFVQPALYEAFGLTVVEAMTCGLPTFATCKGGPAEIIVHGKSGFHIDPYHGDQAADTLADFFEKCKEDPSHWDEISKGALQRIEEKYTWQIYSQRLLTLTGVYGFWKHVSNLDRLEARRYLEMFYALKYRPLAQAVPLAQDD

SEQ ID NO: 894 - protein, 808 aa, Artificial Sequence
  engineered sucrose synthase encoded in plasmid pA33246
MANAERMITRVHSQRERLNETLVSERNEVLALLSRVEAKGKGILQQNQIIAEFEALPEQTRKKLLDGPFFDLLKSTQEAIVLPPWVALAVRPRPGVWEYLRVNLHALVVEELQPAEFLHFKEELVDGVKNGNFTLELDFEAFNASIPRPTLHKYIGNGVDFLNRHLSAKLFHDKESLLPLLEFLRLHSHQGKNLMLSEKIQNLNTLQHTLRKAEEYLAELPPETLYEEFEAKFEEIGLERGWGDNAERVLDMIRLLLDLLEAPDPCTLETFLGRVPMVFNVVILSPHGYFAQDNVLGYPDTGGQVVYILDQVRALENEMLQRIKQQGLNIKPRILILTRLLPDAVGTTCGQRLERVYDTEYCHILRVPFRTEKGIVRKWISRFEVWPYLETYTEDAAVELSKELNGKPDLIIGNYSDGNLVASLLAHKLGVTQCTIAHALEKTKYPDSDIYWKKLDDKYHFSCQFTADIFAMNHADFIITSTFQEIAGSKETVGQYESHTAFTLPGLYRVVHGIDVFDPKFNIVSPGADMSIYFPYTEEKRRLTKFHSEIEELLYSDVENKEHLGVLKDKKKPILFTMARLDRVKNLSGLVEWYGKNTRLRELVNLVVVGGDRRKESKDNEEKAEMKKMYDLIEEYKLNGQFRWISSQMDRVRNGELYRYICDTKGAFVQPALYEAFGLTVVEAMTCGLPTFATCKGGPAEIIVHGKSGFHIDPYHGDQAADTLADFFTKCKEDPSHWDEISKGGLQRIEEKYTWQIYSQRLLTLTGVYGFWKHVSNLDRLEARRYLEMFYALKYRPLAQAVPLAQDD

SEQ ID NO: 895 - protein, 808 aa, Artificial Sequence
  engineered sucrose synthase encoded in plasmid pA33247
MANAERMITRVHSQRERLNETLVSERNEVLALLSRIEAKGKGILQQNQLIAEFEALPEQTRKKLLDGPFAELLKSTQEAIVLPGWVALAVRPRPGVWEYLRVNLHALVVEELQPAEFLHFKEELVDGSTNDNFTLELDFEAFNASIPRPTLHKYIGNGVEFLNRHLSAKLFHDKESLLPLLEFLRLHSHQGKTLMLSDKIQNLNTLQHTLRKAEEYLSTLPPETPYEEFEHKFEEIGLERGWGDNAERVLEMIRLLLDLLEAPDPCTLETFLGRVPMVFNVVILSPHGYFAQDNVLGYPDTGGQVVYILDQVRALEEEMLKRIKQQGLNIKPRILILTRLLPDAVGTTCGQRLERVYDAEYCHILRVPFRTEKGIVRKWISRFEVWPYLETFTEDAAKELSKELQGKPDLIIGNYSDGNLVASLLAHKLGVTQCTIAHALEKTKYPDSDIYWKKLDDKYHFSCQFTADLFAMNHTDFIITSTFQEIAGSKDTVGQYESHTAFTLPGLYRVVHGIDVFDPKFNIVSPGADMSIYFPYTEEKRRLTKFHSEIEELLYSDVENKEHLCVLKDKSKPILFTMARLDRVKNLSGLVEWYGKNPRLRELVNLVVVGGDRRKESKDNEEKAEMKKMYDLIEKYKLNGQFRWISAQMDRVRNGELYRYICDTKGAFVQPALYEAFGLTVVEAMTCGLPTFATCKGGPAEIIVHGKSGFHIDPYHGDQAADLLADFFTKCKEDPSHWDKISKGGLKRIEEKYTWQIYSQRLLTLTGVYGFWKHVSNLDRREARRYLEMFYALKYRPLAQAVPLAQDD

SEQ ID NO: 896 - protein, 808 aa, Artificial Sequence
  engineered sucrose synthase encoded in plasmid pA33248
MANAERMITRVHSQRERLNETLVSERNEVLALLSRVEAKGKGILQQNQIIAEFEALPEQTRKKLLDGPFADLLKSTQEAIVLPGWVALAVRPRPGVWEYLRVNLHALVVEELQPAEFLHFKEELVDGSKNDNFTLELDFEAFNASIPRPTLHKYIGNGVEFLNRHLSAKLFHDKESLLPLLEFLRLHSHQGKTLMLSEKIQNLNTLQHTLRKAEEYLATLPPETPYEEFEHKFEEIGLERGWGDNAERVLEMIRLLLDLLEAPDPCTLETFLGRVPMVFNVVILSPHGYFAQDNVLGYPDTGGQVVYILDQVRALENEMLKRIKQQGLNIKPRILILTRLLPDAVGTTCGQRLERVYDSEYCHILRVPFRTEKGIVRKWISRFEVWPYLETFTEDAAKELSKELNGKPDLIIGNYSDGNLVASLLAHKLGVTQCTIAHALEKTKYPDSDIYWKKLDDKYHFSCQFTADIFAMNHTDFIITSTFQEIAGSKDTVGQYESHTAFTLPGLYRVVHGIDVFDPKFNIVSPGADMSIYFPYTEEKRRLTKFHSEIEELLYSDVENKEHLCVLKDKSKPILFTMARLDRVKNLSGLVEWYGKNPRLRELVNLVVVGGDRRKESKDNEEKAEMKKMYDLIEEYKLNGQFRWISAQMDRVRNGELYRYICDTKGAFVQPALYEAFGLTVVEAMTCGLPTFATCKGGPAEIIVHGKSGFHIDPYHGDQAADLLADFFTKCKEDPSHWDEISKGGLQRIEEKYTWQIYSQRLLTLTGVYGFWKHVSNLDRLEARRYLEMFYALKYRPLAQAVPLAQDD

SEQ ID NO: 897 - protein, 808 aa, Artificial Sequence
  engineered sucrose synthase encoded in plasmid pA33249
MANAERMITRVHSQRERLNETLVSERNEVLALLSRVEAKGKGILQQNQIIAEFEALPEQTRKKLLGGPFADLLKSTQEAIVLPGWVALAVRPRPGVWEYLRVNLHALVVEELQPAEFLHFKEELVDGVKNGNFTLELDFEAFNASIPRPTLHKYIGNGVDFLNRHLSAKLFHDKESLLPLLEFLRLHSHQGKNLMLSEKIQNLNTLQHTLRKAEEYLATLPPETPYEEFEHKFEEIGLERGWGDNAERVLEMIRLLLDLLEAPDPCTLETFLGRVPMVFNVVILSPHGYFAQDNVLGYPDTGGQVVYILDQVRALEEEMLQRIKQQGLNIKPRILILTRLLPDAVGTTCGQRLERVYDSEYCHILRVPFRTEKGIVRKWISRFEVWPYLETFTEDAAVELSKELNGKPDLIIGNYSDGNLVASLLAHKLGVTQCTIAHALEKTKYPDSDIYWKKLDDKYHFSCQFTADIFAMNHTDFIITSTFQEIAGSKDTVGQYESHTAFTLPGLYRVVHGIDVFDPKFNIVSPGADMSIYFPYTEEKRRLTKFHSEIEELLYSDVENKEHLCVLKDKSKPILFTMARLDRVKNLSGLVEWYGKNTRLRELVNLVVVGGDRRKESKDNEEKAEMKKMYDLIEEYKLNGQFRWISAQMDRVRNGELYRYICDTKGAFVQPALYEAFGLTVVEAMTCGLPTFATCKGGPAEIIVHGKSGFHIDPYHGDQAADLLADFFTKCKEDPSHWDEISKGGLQRIEEKYTWQIYSQRLLTLTGVYGFWKHVSNLDRLEARRYLEMFYALKYRPLAQAVPLAQDD

SEQ ID NO: 898 - protein, 808 aa, Artificial Sequence
  engineered sucrose synthase encoded in plasmid pA33250
MANAERMITRVHSQRERLNETLVSERNEVLALLSRVEAKGKGILQQNQIIAEFEALPEQTRKKLEGGPFFDLLKSTQEAIVLPGWVALAVRPRPGVWEYLRVNLHALVVEELQPAEFLHFKEELVDGVKNGNFTLELDFEAFNASIPRPTLHKYIGNGVDFLNRHLSAKLFHDKESLLPLLKFLRLHSHQGKNLMLSEKIQNLNTLQHTLRKAEEYLAELPPETPYEEFEHKFEEIGLERGWGDNAERVLEMIRLLLDLLEAPDPCTLETFLGRVPMVFNVVILSPHGYFAQDNVLGYPDTGGQVVYILDQVRALEIEMLQRIKQQGLNIKPRILILTRLLPDAVGTTCGQRLERVYDSEYCHILRVPFRTEKGIVRKWISRFEVWPYLETYTEDAAVELSKELNGKPDLIIGNYSDGNLVASLLAHKLGVTQCTIAHALEKTKYPDSDIYWKKLDDKYHFSCQFTADIFAMNHTDFIITSTFQEIAGSKETVGQYESHTAFTLPGLYRVVHGIDVFDPKFNIVSPGADMSIYFPYTEEKRRLTKFHSEIEELLYSDVENKEHLCVLKDKKKPILFTMARLDRVKNLSGLVEWYGKNTRLRELVNLVVVGGDRRKESKDNEEKAEMKKMYDLIEEYKLNGQFRWISAQMDRVRNGELYRYICDTKGAFVQPALYEAFGLTVVEAMTCGLPTFATCKGGPAEIIVHGKSGFHIDPYHGDQAADTLADFFTKCKEDPSHWDEISKGGLQRIEEKYTWQIYSQRLLTLTGVYGFWKHVSNLDRLEARRYLEMFYALKYRPLAQAVPLAQDD

SEQ ID NO: 899 - protein, 808 aa, Artificial Sequence
  engineered sucrose synthase encoded in plasmid pA33252
MANAERMITRVHSQRERLNETLVSERNEVLALLSRVETKGKGILQQNQIIAEFEALPEQGEKKLEGGPFFDLLKSTQEAIVLPGWVALAVRPRPGVWEYLRVNLHALVVEELQPAEFLHFKEELVDGSTNGNFTLELDFEAFNASIPRPTLHKYIGNGVEFLNRHLSAKLFHDKESLLPLLKFLRLHSYQGKTLMLSEKIQNLNTLQHVLRKAEEYLATLKPETLYEEFEHKFQEIGLERGWGDNAERVLDMIRLLLDLLEAPDPCTLETFLGRVPMVFNVVILSPHGYFAQDNVLGYPDTGGQVVYILDQVRALEIEMLKRIKQQGLNIKPRILILTRLLPDAVGTTCGQRLERVYDSEYCDILRVPFRTEKGIVRKWISRFEVWPYLETYTEDAAKELSKELNGKPDLIIGNYSDGNLVASLLAHKLGVTQCTIAHALEKTKYPDSDIYWKKLDDKYHFSCQFTADIFAMNHADFIITSTFQEIAGSKETVGQYESHTAFTLPGLYRVVHGIDVFDPKFNIVSPGADMSIYFPYTEEKRRLTKFHSEIEELLYSDVENKEYLGVLKDKSKPILFTMARLDRVKNLSGLVEWYGRNTRLRELVNLVVVGGDRRKESKDNEEKAEMKKMYDLIEEYKLNGQFRWISAQMDRVRNGELYRYICDTKGAFVQPALYEAFGLTVVEAMTCGLPTFATCKGGPAEIIVHGKSGFHIDPYHGDQAADTLADFFTKCKEDPSHWDEISKGALQRIEEKYTWQIYSQRLLTLTGVYGFWKHVSNLDRLEARRYLEMFYALKYRPLAQAVPLAQDD

SEQ ID NO: 900 - protein, 808 aa, Artificial Sequence
  engineered sucrose synthase encoded in plasmid pA33253
MANAERMITRVHSQRERLNETLVSERNEVLALLSRVEAKGKGILQQNQIIAEFEALPEQGEKKLEGGPFFDLLKSTQEAIVLPGWVALAVRPRPGVWEYLRVNLHALVVEELQPAEFLHFKEELVDGVSNGNFTLELDFEAFNASIPRPTLHKYIGNGVEFLNRHLSAKLFHDKESLLPLLKFLRLHSYQGKTLMLSEKIQNLNTLQHVLRKAEEYLATLKPETLYEEFEHKFQEIGLERGWGDNAERVLDMIRLLLDLLEAPDPCTLETFLGRVPMVFNVVILSPHGYFAQDNVLGYPDTGGQVVYILDQVRALEIEMLQRIKQQGLNIKPRILILTRLLPDAVGTTCGQRLERVYDSEYCDILRVPFRTEKGIVRKWISRFEVWPYLETYTEDAAVELSKELNGKPDLIIGNYSDGNLVASLLAHKLGVTQCTIAHALEKTKYPDSDIYWKKLDDKYHFSCQFTADIFAMNHADFIITSTFQEIAGSKETVGQYESHTAFTLPGLYRVVHGIDVFDPKFNIVSPGADMSIYFPYTEEKRRLTKFHSEIEELLYSDVENKEHLGVLKDKSKPILFTMARLDRVKNLSGLVEWYGKNTRLRELVNLVVVGGDRRKESKDNEEKAEMKKMYDLIEEYKLNGQFRWISAQMDRVRNGELYRYICDTKGAFVQPALYEAFGLTVVEAMTCGLPTFATCKGGPAEIIVHGKSGFHIDPYHGDQAADTLADFFTKCKEDPSHWDEISKGGLQRIEEKYTWQIYSQRLLTLTGVYGFWKHVSNLDRLEARRYLEMFYALKYRPLAQAVPLAQDD

SEQ ID NO: 901 - protein, 808 aa, Artificial Sequence
  engineered sucrose synthase encoded in plasmid pA33254
MANAERMITRVHSQRERLNETLVSERNEVLALLSRVEAKGKGILQQNQIIAEFEALPEQTRKKLEGGPFFDLLKSTQEAIVLPGWVALAVRPRPGVWEYLRVNLHALVVEELQPAEFLHFKEELVDGVSNGNFTLELDFEAFNASIPRPTLHKYIGNGVEFLNRHLSAKLFHDKESLLPLLKFLRLHSHQGKTLMLSEKIQNLNTLQHVLRKAEEYLAELKPETLYEEFEHKFEEIGLERGWGDNAERVLDMIRLLLDLLEAPDPCTLETFLGRVPMVFNVVILSPHGYFAQDNVLGYPDTGGQVVYILDQVRALEIEMLQRIKQQGLNIKPRILILTRLLPDAVGTTCGQRLERVYDSEYCDILRVPFRTEKGIVRKWISRFEVWPYLETYTEDAAVELSKELNGKPDLIIGNYSDGNLVASLLAHKLGVTQCTIAHALEKTKYPDSDIYWKKLDDKYHFSCQFTADIFAMNHADFIITSTFQEIAGSKETVGQYESHTAFTLPGLYRVVHGIDVFDPKFNIVSPGADMSIYFPYTEEKRRLTKFHSEIEELLYSDVENKEHLGVLKDKKKPILFTMARLDRVKNLSGLVEWYGKNTRLRELVNLVVVGGDRRKESKDNEEKAEMKKMYDLIEEYKLNGQFRWISAQMDRVRNGELYRYICDTKGAFVQPALYEAFGLTVVEAMTCGLPTFATCKGGPAEIIVHGKSGFHIDPYHGDQAADTLADFFTKCKEDPSHWDEISKGGLQRIEEKYTWQIYSQRLLTLTGVYGFWKHVSNLDRLEARRYLEMFYALKYRPLAQAVPLAQDD

SEQ ID NO: 902 - protein, 808 aa, Artificial Sequence
  engineered sucrose synthase encoded in plasmid pA33255
MANAERMITRVHSQRERLNETLVSERNEVLALLSRIEAKGKGILQQHQILAEYEALPEQGEKKLQDGPFADLLKSTQEAIVLPGWVALAVRPRPGVWEYLRVNLHDLVVEELQPAEFLHFKEELVDGSTNGNFTLELDFEAFNASIPRPTLHKYIGNGVEFLNRHLSAKLFHDKESLLPLLEFLRLHSHQGKNLMLSDKIQNLNTLQHVLRKAEEYLSTLPSETPYEEFEHKFQEIGLERGWGDNAERVLEMIRLLLDLLEAPDPCTLETFLGRVPMVFNVVILSPHGYFAQDNVLGYPDTGGQVVYILDQVRALENEMLKRIKQQGLDIKPRILILTRLLPDAVGTTCGERLERVYDSEYCHILRVPFRTEKGIVRKWISRFEVWPYLETYTEDAAVELSKELNGKPDLIIGNYSDGNLVASLLAHKLGVTQCTIAHALEKTKYPDSDIYWKKLDDKYHFSCQFTADIFAMNHADFIITSTFQEIAGSKDTVGQYESHTAFTLPGLYRVVHGIDVFDPKFNIVSPGADMSIYFPYTEEKRRLTKFHSEIEELLYSDVENKEHLGVLKDKTKPILFTMARLDRVKNLSGLVEWYGKNTRLRELVNLVVVGGDRRKESKDNEEKAEMKKMYDLIEKYKLNGQFRWISAQMDRVRNGELYRYICDTKGAFVQPALYEAFGLTVVEAMTCGLPTFATCKGGPAEIIVHGKSGFHIDPYHGDQAAEILADFFEKCKEDPSHWDKISKGALQRIYEKYTWQIYSQRLLTLTGVYGFWKYVSNLDRLEARRYLEMFYALKYRPLAQAVPLAQDD

SEQ ID NO: 903 - protein, 808 aa, Artificial Sequence
  engineered sucrose synthase encoded in plasmid pA33258
MANAERMITRVHSQRERLNETLVSERNEVLALLSRVEAKGKGILQQNQIIAEFEALPEQTRKKLEGGPFADLLKSTQEAIVLPGWVALAVRPRPGVWEYLRVNLHALVVEELQPAEFLHFKEELVDGVTNGNFTLELDFEAFNASIPRPTLHKYIGNGVEFLNRHLSAKLFHDKESLLPLLEFLRLHSHQGKNLMLSEKIQNLNTLQHVLRKAEEYLAELPSETPYEEFEHKFEEIGLERGWGDNAERVLDMIRLLLDLLEAPDPCTLETFLGRVPMVFNVVILSPHGYFAQDNVLGYPDTGGQVVYILDQVRALEIEMLQRIKQQGLNIKPRILILTRLLPDAVGTTCGERLERVYDSEYCHILRVPFRTEKGIVRKWISRFEVWPYLETYTEDAAVELSKELNGKPDLIIGNYSDGNLVASLLAHKLGVTQCTIAHALEKTKYPDSDIYWKKLDDKYHFSCQFTADIFAMNHADFIITSTFQEIAGSKETVGQYESHTAFTLPGLYRVVHGIDVFDPKFNIVSPGADMSIYFPYTEEKRRLTKFHSEIEELLYSDVENKEHLGVLKDKKKPILFTMARLDRVKNLSGLVEWYGKNTRLRELVNLVVVGGDRRKESKDNEEKAEMKKMYDLIEEYKLNGQFRWISAQMDRVRNGELYRYICDTKGAFVQPALYEAFGLTVVEAMTCGLPTFATCKGGPAEIIVHGKSGFHIDPYHGDQAADLLADFFTKCKEDPSHWDEISKGGLQRIEEKYTWQIYSQRLLTLTGVYGFWKHVSNLDRLEARRYLEMFYALKYRPLAQAVPLAQDD

SEQ ID NO: 904 - protein, 808 aa, Artificial Sequence
  engineered sucrose synthase encoded in plasmid pA33259
MANAERMITRVHSQRERLNETLVSERNEVLALLSRIEQKGKGILQQHQIIAEFEALPEQTRKKLLGGPFFDLLKSTQEAIVLPGWVALAVRPRPGVWEYLRVNVHALVVEELQPAEFLHFKEELVDGVTNGNFILELDFEPFNASIPRPTLHKYIGNGVEFLNRHLSAKLFHDKESLLPLLEFLRLHSHQGKNLMLSEKIQNLNTLQHVLRKAEEYLATLPPETPYEEFEHKFQEIGLERGWGDNAERVLDMIRLLLDLLEAPDPCTLETFLGRVPMVFNVVILSPHGYFAQDNVLGYPDTGGQVVYILDQVRALENEMLKRIKQQGLDIKPRILILTRLLPDAVGTTCGQRLERVYDSEYCDILRVPFRTEKGIVRKWISRFEVWPYLETFTEDAAKELSKELQGKPDLIIGNYSDGNLVASLLAHKLGVTQCTIAHALEKTKYPDSDIYWKKLDDKYHFSCQFTADIFAMNHADFIITSTFQEIAGSKDTVGQYESHTAFTLPGLYRVVHGIDVFDPKFNIVSPGADMSIYFPYTEEKRRLTSFHSEIEELLYSDVENKEHLGVLKDKKKPILFTMARLDRVKNLSGLVEWYGKNTRLRELANLVVVGGDRRKESKDLEEKAEMKKMYDLIEKYKLNGQFRWISAQMDRVRNGELYRYICDTKGAFVQPALYEAFGLTVVEAMTCGLPTFATCYGGPAEIIVHGKSGFHIDPYHGDQAAETLADFFTKCKEDPSHWDKISKGALQRIEEKYTWQIYSQRLLTLTGVYSFWKHVSNLDRLEARRYLEMFYALKYRPLAQAVPLAQDD

SEQ ID NO: 905 - protein, 808 aa, Artificial Sequence
  engineered sucrose synthase encoded in plasmid pA33260
MANAERMITRVHSQRERLNETLVSERNEVLALLSRIEQKGKGILQQNQIIAEFEALPEQTRKKLLGGPFFDLLKSTQEAIVLPGWVALAVRPRPGVWEYLRVNVHALVVEELQPAEFLHFKEELVDGVTNGNFILELDFEPFNASIPRPTLHKYIGNGVEFLNRHLSAKLFHDKESLLPLLEFLRLHSHQGKNLMLSEKIQNLNTLQHVLRKAEEYLATLPPETPYEEFEHKFQEIGLERGWGDNAERVLDMIRLLLDLLEAPDPCTLETFLGRVPMVFNVVILSPHGYFAQDNVLGYPDTGGQVVYILDQVRALENEMLKRIKQQGLDIKPRILILTRLLPDAVGTTCGQRLERVYDSEYCDILRVPFRTEKGIVRKWISRFEVWPYLETFTEDAAKELSKELNGKPDLIIGNYSDGNLVASLLAHKLGVTQCTIAHALEKTKYPDSDIYWKKLDDKYHFSCQFTADIFAMNHADFIITSTFQEIAGSKDTVGQYESHTAFTLPGLYRVVHGIDVFDPKFNIVSPGADMSIYFPYTEEKRRLTKFHSEIEELLYSDVENKEHLGVLKDKKKPILFTMARLDRVKNLSGLVEWYGKNTRLRELANLVVVGGDRRKESKDNEEKAEMKKMYDLIEEYKLNGQFRWISAQMDRVRNGELYRYICDTKGAFVQPALYEAFGLTVVEAMTCGLPTFATCYGGPAEIIVHGKSGFHIDPYHGDQAAETLADFFTKCKEDPSHWDKISKGALQRIEEKYTWQIYSQRLLTLTGVYSFWKHVSNLDRLEARRYLEMFYALKYRPLAQAVPLAQDD

SEQ ID NO: 906 - protein, 808 aa, Artificial Sequence
  engineered sucrose synthase encoded in plasmid pA33261
MANAERMITRVHSQRERLNETLVSERNEVLALLSRVEAKGKGILQQNQIIAEFEALPEQTRKKLLGGPFFDLLKSTQEAIVLPGWVALAVRPRPGVWEYLRVNLHALVVEELQPAEFLHFKEELVDGVTNGNFILELDFEPFNASIPRPTLHKYIGNGVEFLNRHLSAKLFHDKESLLPLLEFLRLHSHQGKNLMLSEKIQNLNTLQHVLRKAEEYLATLPPETPYEEFEHKFQEIGLERGWGDNAERVLDMIRLLLDLLEAPDPCTLETFLGRVPMVFNVVILSPHGYFAQDNVLGYPDTGGQVVYILDQVRALEIEMLQRIKQQGLNIKPRILILTRLLPDAVGTTCGQRLERVYDSEYCDILRVPFRTEKGIVRKWISRFEVWPYLETYTEDAAVELSKELNGKPDLIIGNYSDGNLVASLLAHKLGVTQCTIAHALEKTKYPDSDIYWKKLDDKYHFSCQFTADIFAMNHADFIITSTFQEIAGSKDTVGQYESHTAFTLPGLYRVVHGIDVFDPKFNIVSPGADMSIYFPYTEEKRRLTKFHSEIEELLYSDVENKEHLGVLKDKKKPILFTMARLDRVKNLSGLVEWYGKNTRLRELANLVVVGGDRRKESKDNEEKAEMKKMYDLIEEYKLNGQFRWISAQMDRVRNGELYRYICDTKGAFVQPALYEAFGLTVVEAMTCGLPTFATCKGGPAEIIVHGKSGFHIDPYHGDQAADTLADFFTKCKEDPSHWDEISKGGLQRIEEKYTWQIYSQRLLTLTGVYSFWKHVSNLDRLEARRYLEMFYALKYRPLAQAVPLAQDD

SEQ ID NO: 907 - protein, 808 aa, Artificial Sequence
  engineered sucrose synthase encoded in plasmid pA33262
MANAERMITRVHSQRERLNETLVSERNEVLALLSRVEAKGKGILQQNQIIAEFEALPEQTRKKLEGGPFFDLLKSTQEAIVLPGWVALAVRPRPGVWEYLRVNLHALVVEELQPAEFLHFKEELVDGVTNGNFTLELDFEPFNASIPRPTLHKYIGNGVEFLNRHLSAKLFHDKESLLPLLKFLRLHSHQGKNLMLSEKIQNLNTLQHTLRKAEEYLAELPPETPYEEFEHKFEEIGLERGWGDNAERVLDMIRLLLDLLEAPDPCTLETFLGRVPMVFNVVILSPHGYFAQDNVLGYPDTGGQVVYILDQVRALEIEMLQRIKQQGLNIKPRILILTRLLPDAVGTTCGQRLERVYDSEYCDILRVPFRTEKGIVRKWISRFEVWPYLETYTEDAAVELSKELNGKPDLIIGNYSDGNLVASLLAHKLGVTQCTIAHALEKTKYPDSDIYWKKLDDKYHFSCQFTADIFAMNHADFIITSTFQEIAGSKETVGQYESHTAFTLPGLYRVVHGIDVFDPKFNIVSPGADMSIYFPYTEEKRRLTKFHSEIEELLYSDVENKEHLGVLKDKKKPILFTMARLDRVKNLSGLVEWYGKNTRLRELANLVVVGGDRRKESKDNEEKAEMKKMYDLIEEYKLNGQFRWISAQMDRVRNGELYRYICDTKGAFVQPALYEAFGLTVVEAMTCGLPTFATCKGGPAEIIVHGKSGFHIDPYHGDQAADTLADFFTKCKEDPSHWDEISKGGLQRIEEKYTWQIYSQRLLTLTGVYSFWKHVSNLDRLEARRYLEMFYALKYRPLAQAVPLAQDD

SEQ ID NO: 908 - protein, 808 aa, Artificial Sequence
  engineered sucrose synthase encoded in plasmid pA33263
MANAERMITRVHSQRERLNETLVSERNEVLALLSRIEAKGKGILQQHQLIAEFEALPKQTEKKLLGGPFYDLLKSTQEAIVLPPWVALAVRPRPGVWEYLRVHLHALVVEELQPAEFLHFKEELVDGSSNGNFTLELDFEPFNASIPRPTLHKYIGNGVEFLNRHLSAKLFHDKESLYPLLEFLRLHCHQGKTLMLSDKIQNLNTLQHVLRKAEEYLSTLPPETPYEEFEHKFQEIGLERGWGDNAERVLEMIRLLLDLLEAPDPCTLEKFLGRVPMVFNVVILSPHGYFAQDNVLGYPDTGGQVVYILDQVRALENEMLKRIKQQGLDIKPRILILTRLLPDAVGTTCGQRLERVYDSEYCHILRVPFRTEKGIVRKWISRFEVWPYLETYTEDAANELAKELQGKPDLIIGNYSDGNLVASLLAHKLGVTQCTIAHALEKTKYPDSDIYWKKLDDKYHFSCQFTADLFAMNHTDFIITSTFQEIAGSKDTVGQYESHTAFTLPGLYRVVHGIDVFDPKFNIVSPGADMSIYFPYTEEKRRLTSFHPEIEELLYSDVENKEHLCVLKDKNKPILFTMARLDRVKNLSGLVEWYGKNTRLRELANLVVVGGDRRKESKDNEEQAEMKKMYDLIEKYKLNGHFRWISSQMNRVRNGELYRYICDTKGAFVQPALYEAFGLTVVEAMTCGLPTFATCYGGPAEIIVHGKSGFHIDPYHGDQAAELLADFFEKCKEDPSHWDEISQGGLQRIEEKYTWQIYSQRLLTLTGVYGFWKHVSNLDRREARRYLEMFYALKYRPLAQAVPLAQDD

SEQ ID NO: 909 - protein, 808 aa, Artificial Sequence
  engineered sucrose synthase encoded in plasmid pA33264
MANAERMITRVHSQRERLNETLVSERNEVLALLSRVEAKGKGILQQHQIIAEFEALPEQTRKKLLGGPFFDLLKSTQEAIVLPPWVALAVRPRPGVWEYLRVNLHALVVEELQPAEFLHFKEELVDGVSNGNFTLELDFEPFNASIPRPTLHKYIGNGVEFLNRHLSAKLFHDKESLYPLLKFLRLHCHQGKTLMLSDKIQNLNTLQHTLRKAEEYLATLPPETPYEEFEHKFQEIGLERGWGDNAERVLEMIRLLLDLLEAPDPCTLETFLGRVPMVFNVVILSPHGYFAQDNVLGYPDTGGQVVYILDQVRALENEMLQRIKQQGLDIKPRILILTRLLPDAVGTTCGQRLERVYDSEYCHILRVPFRTEKGIVRKWISRFEVWPYLETYTEDAANELSKELQGKPDLIIGNYSDGNLVASLLAHKLGVTQCTIAHALEKTKYPDSDIYWKKLDDKYHFSCQFTADLFAMNHTDFIITSTFQEIAGSKDTVGQYESHTAFTLPGLYRVVHGIDVFDPKFNIVSPGADMSIYFPYTEEKRRLTKFHPEIEELLYSDVENKEHLCVLKDKNKPILFTMARLDRVKNLSGLVEWYGKNTRLRELANLVVVGGDRRKESKDNEEKAEMKKMYDLIEEYKLNGQFRWISSQMNRVRNGELYRYICDTKGAFVQPALYEAFGLTVVEAMTCGLPTFATCHGGPAEIIVHGKSGFHIDPYHGDQAADLLADFFTKCKEDPSHWDEISKGGLQRIEEKYTWQIYSQRLLTLTGVYGFWKHVSNLDRLEARRYLEMFYALKYRPLAQAVPLAQDD

SEQ ID NO: 910 - protein, 808 aa, Artificial Sequence
  engineered sucrose synthase encoded in plasmid pA33267
MANAERMITRVHSQRERLNETLVSERNEVLALLSRIEAKGKGILQQHQIIAEFEALPEQTRKKLLGGPFFDLLKSTQEAIVLPPWVALAVRPRPGVWEYLRVHLHALVVEELQPAEFLHFKEELVDGSKNGNFTLELDFEPFNASIPRPTLHKYIGNGVDFLNRHLSAKLFHDKESLYPLLEFLRLHCHRGKTLMLSDKIQNLNTLQHVLRKAEEYLSELPPETPYEEFEAKFQEIGLERGWGDNAERVLEMIRLLLDLLEAPDPCTLEKFLGRVPMVFNVVILSPHGYFAQDNVLGYPDTGGQVVYILDQVRALENEMLQRIKQQGLDIKPRILILTRLLPDAVGTTCGQRLERVYDSEYCHILRVPFRTEKGIVRKWISRFEVWPYLETYTEDAANELAKELQGKPDLIIGNYSDGNLVASLLAHKLGVTQCTIAHALEKTKYPDSDIYWKKLDDKYHFSCQFTADLFAMNHTDFIITSTFQEIAGSKDTVGQYESHTAFTLPGLYRVVHGIDVFDPKFNIVSPGADMSIYFPYTEEKRRLTKFHPEIEELLYSDVENKEHLCVLKDKNKPILFTMARLDRVKNLSGLVEWYGKNPRLRELANLVVVGGDRRKESKDNEEQAEMKKMYDLIEEYKLNGHFRWISSQMDRVRNGELYRYICDTKGAFVQPALYEAFGLTVVEAMTCGLPTFATCKGGPAEIIVHGKSGFHIDPYHGDQAAELLADFFEKCKEDPSHWDEISKGGLQRIEEKYTWQIYSQRLLTLTGVYGFWKHVSNLDRLEARRYLEMFYALKYRPLAQAVPLAQDD

SEQ ID NO: 911 - protein, 808 aa, Artificial Sequence
  engineered sucrose synthase encoded in plasmid pA33269
MANAERMITRVHSQRERLNETLVSERNEVLALLSRVEAKGKGILQQNQIIAEFEALPEQTRKKLLGGPFFDLLKSTQEAIVLPPWVALAVRPRPGVWEYLRVNLHALVVEELQPAEFLHFKEELVDGVKNGNFTLELDFEPFNASIPRPTLHKYIGNGVDFLNRHLSAKLFHDKESLYPLLKFLRLHSHQGKTLMLSDKIQNLNTLQHTLRKAEEYLAELPSETPYEEFEAKFQEIGLERGWGDNAERVLDMIRLLLDLLEAPDPCTLETFLGRVPMVFNVVILSPHGYFAQDNVLGYPDTGGQVVYILDQVRALENEMLQRIKQQGLNIKPRILILTRLLPDAVGTTCGQRLERVYDSEYCHILRVPFRTEKGIVRKWISRFEVWPYLETYTEDAAVELSKELQGKPDLIIGNYSDGNLVASLLAHKLGVTQCTIAHALEKTKYPDSDIYWKKLDDKYHFSCQFTADLFAMNHTDFIITSTFQEIAGSKDTVGQYESHTAFTLPGLYRVVHGIDVFDPKFNIVSPGADMSIYFPYTEEKRRLTKFHPEIEELLYSDVENKEHLCVLKDKKKPILFTMARLDRVKNLSGLVEWYGKNTRLRELANLVVVGGDRRKESKDNEEKAEMKKMYDLIEEYKLNGQFRWISSQMDRVRNGELYRYICDTKGAFVQPALYEAFGLTVVEAMTCGLPTFATCKGGPAEIIVHGKSGFHIDPYHGDQAADLLADFFTKCKEDPSHWDEISKGGLQRIEEKYTWQIYSQRLLTLTGVYGFWKHVSNLDRLEARRYLEMFYALKYRPLAQAVPLAQDD

SEQ ID NO: 912 - protein, 808 aa, Artificial Sequence
  engineered sucrose synthase encoded in plasmid pA33270
MANAERMITRVHSQRERLNETLVSERNEVLALLSRVEAKGKGILQQNQIIAEFEALPEQTRKKLLGGPFFDLLKSTQEAIVLPPWVALAVRPRPGVWEYLRVNLHALVVEELQPAEFLHFKEELVDGVKNGNFTLELDFEPFNASIPRPTLHKYIGNGVDFLNRHLSAKLFHDKESLLPLLKFLRLHSHQGKNLMLSEKIQNLNTLQHTLRKAEEYLAELPSETPYEEFEAKFQEIGLERGWGDNAERVLDMIRLLLDLLEAPDPCTLETFLGRVPMVFNVVILSPHGYFAQDNVLGYPDTGGQVVYILDQVRALENEMLQRIKQQGLNIKPRILILTRLLPDAVGTTCGQRLERVYDSEYCHILRVPFRTEKGIVRKWISRFEVWPYLETYTEDAAVELSKELNGKPDLIIGNYSDGNLVASLLAHKLGVTQCTIAHALEKTKYPDSDIYWKKLDDKYHFSCQFTADIFAMNHTDFIITSTFQEIAGSKDTVGQYESHTAFTLPGLYRVVHGIDVFDPKFNIVSPGADMSIYFPYTEEKRRLTKFHPEIEELLYSDVENKEHLCVLKDKKKPILFTMARLDRVKNLSGLVEWYGKNTRLRELANLVVVGGDRRKESKDNEEKAEMKKMYDLIEEYKLNGQFRWISSQMDRVRNGELYRYICDTKGAFVQPALYEAFGLTVVEAMTCGLPTFATCKGGPAEIIVHGKSGFHIDPYHGDQAADTLADFFTKCKEDPSHWDEISKGGLQRIEEKYTWQIYSQRLLTLTGVYGFWKHVSNLDRLEARRYLEMFYALKYRPLAQAVPLAQDD

SEQ ID NO: 913 - protein, 808 aa, Artificial Sequence
  engineered sucrose synthase encoded in plasmid pA33271
MANAERMITRVHSQRERLNETLVSERNEVLALLSRIEAKGKGILQQNQIIAEFEALPEQTEKKLLGGPFFDLLKSTQEAIVLPPWIALAVRPRPGVWEYLRVNLNALVVEELQPAEFLHFKEELVDGSSNGNFTLELDFEPFNASIPRPTLHKYIGNGVQFLNRHLSAKLFHDKESLYPLLEFLRLHCHRGKTLMLSDKIQNLNTLQHTLRKAEEYLSTLKPETPYEEFEHKFEEIGLERGWGDNAERVLEMIRLLLDLLEAPDPCTLEKFLGRVPMVFNVVILSPHGYFAQDNVLGYPDTGGQVVYILDQVRALENEMLKRIKQQGLNIKPRILILTRLLPDAVGTTCGQRLERVYDSEYCHILRVPFRTEKGIVRKWISRFEVWPYLETYTEDAANELAKELQGKPDLIIGNYSDGNLVASLLAHKLGVTQCTIAHALEKTKYPDSDIYWKKLDDKYHFSCQFTADLFAMNHTDFIITSTFQEIAGSKDTVGQYESHTAFTLPGLYRVVHGIDVFDPKFNIVSPGADMSIYFPYTEEKRRLTKFHPEIEELLYSDVENKEHLCVLKDKNKPILFTMARLDRVKNLSGLVEWYGKNTRLRELANLVVVGGDRRKESKDNEEQAEMKKMYDLIEKYKLNGQFRWISAQMNRVRNGELYRYICDTKGAFVQPALYEAFGLTVVEAMTCGLPTFATCHGGPAEIIVHGKSGFHIDPYHGDQAADLLADFFEKCKEDPSHWDEISQGGLQRIEEKYTWQIYSQRLLTLAGVYGFWKHVSNLDRLEARRYLEMFYALKYRPLAQAVPLAQDD

SEQ ID NO: 914 - protein, 808 aa, Artificial Sequence
  engineered sucrose synthase encoded in plasmid pA33272
MANAERMITRVHSQRERLNETLVSERNEVLALLSRIEAKGKGILQQNQIIAEFEALPEQTRKKLNGGPFFDLLKSTQEAIVLPPWVALAVRPRPGVWEYLRVNLHALVVEELQPAEFLHFKEELVDGVSNGNFTLELDFEPFNASIPRPTLHKYIGNGVQFLNRHLSAKLFHDKESLYPLLKFLRLHCHRGKNLMLSDKIQNLNTLQHTLRKAEEYLATLKPETPYEEFEHKFEEIGLERGWGDNAERVLEMIRLLLDLLEAPDPCTLETFLGRVPMVFNVVILSPHGYFAQDNVLGYPDTGGQVVYILDQVRALENEMLQRIKQQGLNIKPRILILTRLLPDAVGTTCGQRLERVYDSEYCHILRVPFRTEKGIVRKWISRFEVWPYLETYTEDAANELSKELQGKPDLIIGNYSDGNLVASLLAHKLGVTQCTIAHALEKTKYPDSDIYWKKLDDKYHFSCQFTADLFAMNHTDFIITSTFQEIAGSKDTVGQYESHTAFTLPGLYRVVHGIDVFDPKFNIVSPGADMSIYFPYTEEKRRLTKFHPEIEELLYSDVENKEHLCVLKDKNKPILFTMARLDRVKNLSGLVEWYGKNTRLRELANLVVVGGDRRKESKDNEEKAEMKKMYDLIEEYKLNGQFRWISSQMNRVRNGELYRYICDTKGAFVQPALYEAFGLTVVEAMTCGLPTFATCHGGPAEIIVHGKSGFHIDPYHGDQAADLLADFFTKCKEDPSHWDEISKGGLQRIEEKYTWQIYSQRLLTLTGVYGFWKHVSNLDRLEARRYLEMFYALKYRPLAQAVPLAQDD

SEQ ID NO: 915 - protein, 808 aa, Artificial Sequence
  engineered sucrose synthase encoded in plasmid pA33273
MANAERMITRVHSQRERLNETLVSERNEVLALLSRVEAKGKGILQQNQIIAEFEALPEQTRKKLLGGPFFDLLKSTQEAIVLPPWVALAVRPRPGVWEYLRVNLHALVVEELQPAEFLHFKEELVDGVKNGNFTLELDFEPFNASIPRPTLHKYIGNGVEFLNRHLSAKLFHDKESLYPLLKFLRLHSHRGKNLMLSDKIQNLNTLQHTLRKAEEYLAELKSETPYEEFEHKFEEIGLERGWGDNAERVLEMIRLLLDLLEAPDPCTLETFLGRVPMVFNVVILSPHGYFAQDNVLGYPDTGGQVVYILDQVRALENEMLQRIKQQGLNIKPRILILTRLLPDAVGTTCGQRLERVYDSEYCHILRVPFRTEKGIVRKWISRFEVWPYLETYTEDAAVELSKELNGKPDLIIGNYSDGNLVASLLAHKLGVTQCTIAHALEKTKYPDSDIYWKKLDDKYHFSCQFTADLFAMNHTDFIITSTFQEIAGSKDTVGQYESHTAFTLPGLYRVVHGIDVFDPKFNIVSPGADMSIYFPYTEEKRRLTKFHPEIEELLYSDVENKEHLCVLKDKKKPILFTMARLDRVKNLSGLVEWYGKNTRLRELANLVVVGGDRRKESKDNEEKAEMKKMYDLIEEYKLNGQFRWISSQMNRVRNGELYRYICDTKGAFVQPALYEAFGLTVVEAMTCGLPTFATCHGGPAEIIVHGKSGFHIDPYHGDQAADLLADFFTKCKEDPSHWDEISKGGLQRIEEKYTWQIYSQRLLTLTGVYGFWKHVSNLDRLEARRYLEMFYALKYRPLAQAVPLAQDD

SEQ ID NO: 916 - protein, 808 aa, Artificial Sequence
  engineered sucrose synthase encoded in plasmid pA33274
MANAERMITRVHSQRERLNETLVSERNEVLALLSRVEAKGKGILQQNQIIAEFEALPEQTRKKLLGGPFFDLLKSTQEAIVLPPWVALAVRPRPGVWEYLRVNLHALVVEELQPAEFLHFKEELVDGVKNGNFTLELDFEPFNASIPRPTLHKYIGNGVDFLNRHLSAKLFHDKESLLPLLKFLRLHSHRGKNLMLSEKIQNLNTLQHTLRKAEEYLAELKSETPYEEFEAKFEEIGLERGWGDNAERVLEMIRLLLDLLEAPDPCTLETFLGRVPMVFNVVILSPHGYFAQDNVLGYPDTGGQVVYILDQVRALENEMLQRIKQQGLNIKPRILILTRLLPDAVGTTCGQRLERVYDSEYCHILRVPFRTEKGIVRKWISRFEVWPYLETYTEDAAVELSKELNGKPDLIIGNYSDGNLVASLLAHKLGVTQCTIAHALEKTKYPDSDIYWKKLDDKYHFSCQFTADLFAMNHTDFIITSTFQEIAGSKETVGQYESHTAFTLPGLYRVVHGIDVFDPKFNIVSPGADMSIYFPYTEEKRRLTKFHPEIEELLYSDVENKEHLCVLKDKKKPILFTMARLDRVKNLSGLVEWYGKNTRLRELANLVVVGGDRRKESKDNEEKAEMKKMYDLIEEYKLNGQFRWISSQMDRVRNGELYRYICDTKGAFVQPALYEAFGLTVVEAMTCGLPTFATCKGGPAEIIVHGKSGFHIDPYHGDQAADTLADFFTKCKEDPSHWDEISKGGLQRIEEKYTWQIYSQRLLTLTGVYGFWKHVSNLDRLEARRYLEMFYALKYRPLAQAVPLAQDD

SEQ ID NO: 917 - protein, 808 aa, Artificial Sequence
  engineered sucrose synthase encoded in plasmid pA33276
MANAERMITRVHSQRERLNETLVSERNEVLALLSRVEAKGKGILQQHQIIAEFEALPEQTRRKLEGGPFFDLLKSTQEAIVLPPWVALAVRPRPGVWEYLRVNLHALVVEELQPAEFLHFKEELVDGVSNGNFTLELDFEPFNASIPRPTLHKYIGNGVQFLNRHLSAKLFHDKESLLPLLKFLRLHCHQGKTLMLSEKIQNLNTLQHVLRKAEEYLATLKPETLYEEFEHKFQEIGLERGWGDNAERVLDMIRLLLDLLEAPDPCTLEKFLGRVPMVFNVVILSPHGYFAQDNVLGYPDTGGQVVYILDQVRALEIEMLQRIKQQGLDIKPRILILTRLLPDAVGTTCGQRLERVYDSEYCDILRVPFRTEKGIVRKWISRFEVWPYLETYTEDAANELSKELQGKPDLIIGNYSDGNLVASLLAHKLGVTQCTIAHALEKTKYPDSDIYWKKLDDKYHFSCQFTADLFAMNHTDFIITSTFQEIAGSKETVGQYESHTAFTLPGLYRVVHGIDVFDPKFNIVSPGADMSIYFPYTEEKRRLTKFHSEIEELLYSDVENKEHLCVLKDKNKPILFTMARLDRVKNLSGLVEWYGKNTRLRELANLVVVGGDRRKESKDNEEKAEMKKMYDLIEEYKLNGHFRWISSQMNRVRNGELYRYICDTKGAFVQPALYEAFGLTVVEAMTCGLPTFATCYGGPAEIIVHGKSGFHIDPYHGDQAAELLADFFEKCKEDPSHWDEISKGGLQRIEEKYTWQIYSQRLLTLTGVYGFWKHVSNLDRLEARRYLEMFYALKYRPLAQAVPLAQDD

SEQ ID NO: 918 - protein, 808 aa, Artificial Sequence
  engineered sucrose synthase encoded in plasmid pA33278
MANAERMITRVHSQRERLNETLVSERNEVLALLSRVEAKGKGILQQNQIIAEFEALPEQTRRKLEGGPFFDLLKSTQEAIVLPPWVALAVRPRPGVWEYLRVNLHALVVEELQPAEFLHFKEELVDGVKNGNFTLELDFEPFNASIPRPTLHKYIGNGVDFLNRHLSAKLFHDKESLLPLLKFLRLHSHQGKNLMLSEKIQNLNTLQHTLRKAEEYLAELKPETLYEEFEAKFQEIGLERGWGDNAERVLDMIRLLLDLLEAPDPCTLETFLGRVPMVFNVVILSPHGYFAQDNVLGYPDTGGQVVYILDQVRALEIEMLQRIKQQGLNIKPRILILTRLLPDAVGTTCGQRLERVYDSEYCDILRVPFRTEKGIVRKWISRFEVWPYLETYTEDAAVELSKELNGKPDLIIGNYSDGNLVASLLAHKLGVTQCTIAHALEKTKYPDSDIYWKKLDDKYHFSCQFTADIFAMNHTDFIITSTFQEIAGSKETVGQYESHTAFTLPGLYRVVHGIDVFDPKFNIVSPGADMSIYFPYTEEKRRLTKFHSEIEELLYSDVENKEHLCVLKDKKKPILFTMARLDRVKNLSGLVEWYGKNTRLRELANLVVVGGDRRKESKDNEEKAEMKKMYDLIEEYKLNGQFRWISSQMDRVRNGELYRYICDTKGAFVQPALYEAFGLTVVEAMTCGLPTFATCKGGPAEIIVHGKSGFHIDPYHGDQAAETLADFFTKCKEDPSHWDEISKGGLQRIEEKYTWQIYSQRLLTLTGVYGFWKHVSNLDRLEARRYLEMFYALKYRPLAQAVPLAQDD

SEQ ID NO: 919 - protein, 808 aa, Artificial Sequence
  engineered sucrose synthase encoded in plasmid pA33279
MANAERMITRVHSQRERLNETLVSERNEVLALLSRIEAKGKGILQHHQIIAEFEALPEQTEKKLQGGPFGDLLKSTQEAIVLPPWVALAVRPRPGVWEYLRVHLNALVVEELQPAEFLHFKEELVDGSSNGNFTLELDFEPFNASIPRPTLHKYIGNGVEFLNRHLSAKLFHDKESLHPLLEFLRLHCHQGKNLMLNDKIQNLNTLQHVLRKAEEYLSTLPSETPYEEFEHKFQEIGLERGWGDNAERVLEMIRLLLDLLEAPDPCTLETFLGRVPMVFNVVILSPHGYFAQDNVLGYPDTGGQVVYILDQVRALENEMLKRIKQQGLDIKPRILILTRLLPDAVGTTCGERLERVYDSEYCHILRVPFRTEKGIVRKWISRFEVWPYLETYAEDAAVELAKELNGKPDLIIGNYSDGNLVASLLAHKLGVTQCTIAHALEKTKYPDSDIYWKKLDDKYHFSCQFTADIFAMNHADFIITSTFQEIAGSKDTVGQYESHTAFTLPGLYRVVHGIDVFDPKFNIVSPGADMSIYFPYTEEKRRLTSFHPEIEELLYSDVENKEHLCVLKDKNKPILFTMARLDRVKNLSGLVEWYGKNPRLRELANLVVVGGDRRKESKDNEEQAEMKKMYDLIEKYKLNGHFRWISSQMNRVRNGELYRYICDTKGAFVQPALYEAFGLTVVEAMTCGLPTFATCYGGPAEIIVHGKSGFHIDPYHGDKAAELLADFFEKCKEDPSHWDEISQGGLKRIEEKYTWKIYSQRLLTLTGVYGFWKHVSKLDRLEARRYLEMFYALKYRPLAQAVPLAQDD

SEQ ID NO: 920 - protein, 808 aa, Artificial Sequence
  engineered sucrose synthase encoded in plasmid pA33280
MANAERMITRVHSQRERLNETLVSERNEVLALLSRIEAKGKGILQQHQIIAEFEALPEQTRKKLQGGPFGDLLKSTQEAIVLPPWVALAVRPRPGVWEYLRVNLNALVVEELQPAEFLHFKEELVDGVSNGNFTLELDFEPFNASIPRPTLHKYIGNGVEFLNRHLSAKLFHDKESLYPLLKFLRLHCHQGKNLMLNDKIQNLNTLQHVLRKAEEYLATLPSETPYEEFEHKFQEIGLERGWGDNAERVLEMIRLLLDLLEAPDPCTLETFLGRVPMVFNVVILSPHGYFAQDNVLGYPDTGGQVVYILDQVRALENEMLQRIKQQGLDIKPRILILTRLLPDAVGTTCGERLERVYDSEYCHILRVPFRTEKGIVRKWISRFEVWPYLETYAEDAAVELSKELNGKPDLIIGNYSDGNLVASLLAHKLGVTQCTIAHALEKTKYPDSDIYWKKLDDKYHFSCQFTADIFAMNHADFIITSTFQEIAGSKDTVGQYESHTAFTLPGLYRVVHGIDVFDPKFNIVSPGADMSIYFPYTEEKRRLTKFHPEIEELLYSDVENKEHLCVLKDKNKPILFTMARLDRVKNLSGLVEWYGKNPRLRELANLVVVGGDRRKESKDNEEKAEMKKMYDLIEEYKLNGHFRWISSQMNRVRNGELYRYICDTKGAFVQPALYEAFGLTVVEAMTCGLPTFATCYGGPAEIIVHGKSGFHIDPYHGDKAAELLADFFEKCKEDPSHWDEISKGGLKRIEEKYTWQIYSQRLLTLTGVYGFWKHVSNLDRLEARRYLEMFYALKYRPLAQAVPLAQDD

SEQ ID NO: 921 - protein, 808 aa, Artificial Sequence
  engineered sucrose synthase encoded in plasmid pA33281
MANAERMITRVHSQRERLNETLVSERNEVLALLSRVEAKGKGILQQNQIIAEFEALPEQTRKKLEGGPFFDLLKSTQEAIVLPPWVALAVRPRPGVWEYLRVNLNALVVEELQPAEFLHFKEELVDGVKNGNFTLELDFEPFNASIPRPTLHKYIGNGVEFLNRHLSAKLFHDKESLYPLLKFLRLHSHQGKNLMLNDKIQNLNTLQHVLRKAEEYLATLPSETPYEEFEHKFQEIGLERGWGDNAERVLDMIRLLLDLLEAPDPCTLETFLGRVPMVFNVVILSPHGYFAQDNVLGYPDTGGQVVYILDQVRALENEMLQRIKQQGLNIKPRILILTRLLPDAVGTTCGERLERVYDSEYCHILRVPFRTEKGIVRKWISRFEVWPYLETYAEDAAVELSKELNGKPDLIIGNYSDGNLVASLLAHKLGVTQCTIAHALEKTKYPDSDIYWKKLDDKYHFSCQFTADIFAMNHADFIITSTFQEIAGSKDTVGQYESHTAFTLPGLYRVVHGIDVFDPKFNIVSPGADMSIYFPYTEEKRRLTKFHPEIEELLYSDVENKEHLCVLKDKKKPILFTMARLDRVKNLSGLVEWYGKNPRLRELANLVVVGGDRRKESKDNEEKAEMKKMYDLIEEYKLNGQFRWISSQMNRVRNGELYRYICDTKGAFVQPALYEAFGLTVVEAMTCGLPTFATCYGGPAEIIVHGKSGFHIDPYHGDKAAELLADFFTKCKEDPSHWDEISKGGLQRIEEKYTWQIYSQRLLTLTGVYGFWKHVSNLDRLEARRYLEMFYALKYRPLAQAVPLAQDD

SEQ ID NO: 922 - protein, 808 aa, Artificial Sequence
  engineered sucrose synthase encoded in plasmid pA33282
MANAERMITRVHSQRERLNETLVSERNEVLALLSRVEAKGKGILQQNQIIAEFEALPEQTRKKLEGGPFFDLLKSTQEAIVLPPWVALAVRPRPGVWEYLRVNLNALVVEELQPAEFLHFKEELVDGVKNGNFTLELDFEPFNASIPRPTLHKYIGNGVDFLNRHLSAKLFHDKESLYPLLKFLRLHSHQGKNLMLNEKIQNLNTLQHVLRKAEEYLAELPSETPYEEFEAKFQEIGLERGWGDNAERVLDMIRLLLDLLEAPDPCTLETFLGRVPMVFNVVILSPHGYFAQDNVLGYPDTGGQVVYILDQVRALENEMLQRIKQQGLNIKPRILILTRLLPDAVGTTCGERLERVYDSEYCHILRVPFRTEKGIVRKWISRFEVWPYLETYAEDAAVELSKELNGKPDLIIGNYSDGNLVASLLAHKLGVTQCTIAHALEKTKYPDSDIYWKKLDDKYHFSCQFTADIFAMNHADFIITSTFQEIAGSKDTVGQYESHTAFTLPGLYRVVHGIDVFDPKFNIVSPGADMSIYFPYTEEKRRLTKFHPEIEELLYSDVENKEHLCVLKDKKKPILFTMARLDRVKNLSGLVEWYGKNPRLRELANLVVVGGDRRKESKDNEEKAEMKKMYDLIEEYKLNGQFRWISSQMDRVRNGELYRYICDTKGAFVQPALYEAFGLTVVEAMTCGLPTFATCHGGPAEIIVHGKSGFHIDPYHGDQAAEILADFFTKCKEDPSHWDEISKGGLQRIEEKYTWQIYSQRLLTLTGVYGFWKHVSNLDRLEARRYLEMFYALKYRPLAQAVPLAQDD

SEQ ID NO: 923 - protein, 808 aa, Artificial Sequence
  engineered sucrose synthase encoded in plasmid pA33285
MANAERMITRVHSQRERLNETLVSERNEVLALLSRVEAKGKGILQQNQIIAEFEALPEQTRKKLLGGPFFDLLKSTQEAIVLPPWVALAVRPRPGVWEYLRVNLHALVVEELQPAEFLHFKEELVDGVKNGNFTLELDFEPFNASIPRPTLHKYIGNGVEFLNRHLSAKLFHDKESLYPLLKFLRLHSHQGKNLMLSDKIQNLNTLQHVLRKAEEYLATLPPETPYEEFEHKFQEIGLERGWGDNAERVLDMIRLLLDLLEAPDPCTLETFLGRVPMVFNVVILSPHGYFAQDNVLGYPDTGGQVVYILDQVRALENEMLQRIKQQGLNIKPRILILTRLLPDAVGTTCGQRLERVYGSEYCDILRVPFRTEKGIVRKWISRFEVWPYLETYTEDAAVELSKELNGKPDLIIGNYSDGNLVASLLAHKLGVTQCTIAHALEKTKYPDSDIYWKKLDDKYHFSCQFTADIFAMNHTDFIITSTFQEIAGSKDTVGQYESHTAFTLPGLYRVVHGIDVFDPKFNIVSPGADMSIYFPYTEEKRRLTKFHPEIEELLYSDVENKEHLCVLKDKKKPILFTMARLDRVKNLSGLVEWYGKNTRLRELANLVVVGGDRRKESKDNEEQAEMKKMYDLIEEYKLNGQFRWISSQMDRVRNGELYRYICDTKGAFVQPALYEAFGLTVVEAMTCGLPTFATCYGGPAEIIVHGKSGFHIDPYHGDQAADTLADFFTKCKEDPSHWDEISKGGLQRIEEKYTWQIYSQRLLTLTGVYGFWKHVSNLDRLEARRYLEMFYALKYRPLAQAVPLAQDD

SEQ ID NO: 924 - protein, 808 aa, Artificial Sequence
  engineered sucrose synthase encoded in plasmid pA33286
MANAERMITRVHSQRERLNETLVSERNEVLALLSRVEAKGKGILQQNQIIAEFEALPEQTRKKLLGGPFFDLLKSTQEAIVLPPWVALAVRPRPGVWEYLRVNLHALVVEELQPAEFLHFKEELVDGVKNGNFTLELDFEPFNASIPRPTLHKYIGNGVDFLNRHLSAKLFHDKESLYPLLKFLRLHSHQGKNLMLSEKIQNLNTLQHVLRKAEEYLAELPPETPYEEFEAKFEEIGLERGWGDNAERVLDMIRLLLDLLEAPDPCTLETFLGRVPMVFNVVILSPHGYFAQDNVLGYPDTGGQVVYILDQVRALENEMLQRIKQQGLNIKPRILILTRLLPDAVGTTCGQRLERVYDSEYCDILRVPFRTEKGIVRKWISRFEVWPYLETYTEDAAVELSKELNGKPDLIIGNYSDGNLVASLLAHKLGVTQCTIAHALEKTKYPDSDIYWKKLDDKYHFSCQFTADIFAMNHTDFIITSTFQEIAGSKETVGQYESHTAFTLPGLYRVVHGIDVFDPKFNIVSPGADMSIYFPYTEEKRRLTKFHPEIEELLYSDVENKEHLCVLKDKKKPILFTMARLDRVKNLSGLVEWYGKNTRLRELANLVVVGGDRRKESKDNEEKAEMKKMYDLIEEYKLNGQFRWISSQMDRVRNGELYRYICDTKGAFVQPALYEAFGLTVVEAMTCGLPTFATCKGGPAEIIVHGKSGFHIDPYHGDQAADTLADFFTKCKEDPSHWDEISKGGLQRIEEKYTWQIYSQRLLTLTGVYGFWKHVSNLDRLEARRYLEMFYALKYRPLAQAVPLAQDD

SEQ ID NO: 925 - protein, 793 aa, Artificial Sequence
  engineered sucrose synthase encoded in plasmid pA32582
MIEVLRQQLLDSPNSWRAFLRHLVASQRGIWLHTDLQHECKTFREQPPEGYPEDIGWLADFIAHCQEAIFLDPWMYFAWRLRPGVWEYVRIHVEQLAVEELSTDEYLQAKEQLVDGGPEGEAVLTVDFEDFRPVSQRLKDESTIGNGLEHLNRHLAGRIWTDLKEGRSAILEFLRLHRLDGQQLMLSDRITDFDSLRQAVQYLGTLPPETPWAEFREDMRRRGFEPGWGNTAGRVRETMRLLMDLLDSPSPAALEKFLARIPMISNVLIVSIHGWFAQDNVLGRPDTGGQVVYILDQARALEREMRNRLRQQGVDVEPRILIATRLIPEADGTTCDQRLEPVHGTEHVWILRVPFRYEDGRIHPHWISRFKVWPYLERYARDLEREVKAELGGRPDLIIGNYSDGNLVATILSEKLGVTQCNIAHALEKTKYPGSDLYWKKYEQQYHFACQFTADLIAMNAADIIITSTYQEIAGNDREVGQYESHQDYTLPGLYRVVNGIDVFDPKFNIVSPGADPSIYFPYTRKEERFSSLHPEIESLLFGREPGPDIRGVLEDPSKPIILSVARMDRIKNLSGLAEWYGRSARLRSLANLVIIGGHVDVQKSMDAEEREEIRRMHEIMDRYQLDGQMRWVGSHLDKRRVGELYRVVADRRGVFVQPALFEAFGLTVIEAMSSGLPVFATRHGGPLEIIEDGVSGFHIDPNDPDAVAEKLADFLERARERPKYWEEISQAALARVEERYTWERYAERLMTIARVFGFWRFVSSRERQVMRRYLQMFRHLQWRPLAHAVPME

SEQ ID NO: 926 - protein, 793 aa, Artificial Sequence
  engineered sucrose synthase encoded in plasmid pA32586
MIEVLRQQLLDSPNSWRAFLRHLVASQRGFWLHTDLQHACKTFREQPPEGYPEDIGPLADFIAHCQEAIFRDPWMVFAWRERPGVWEYVRIHVEQLAVEELSVDEYLQAKEQLVDGGAEGEAVLTVDFEDFRPVSQRLKDESTIGNGLEHLNRHLAGRIWTDLADGRSAILEFLRLHRLDGQQLMLSDRITDFDSLRQTLQYLGTLPRETPWAEFREDMRRRGFEPGWGNTAGRVRETMRLLMDLLDSPSPAALEKFLARIPMISNVLIVSIHGWFAQDNVLGRPDTGGQVVYILDQARALEREMRRRLRQQGVDVEPRILIATRLIPESDGTTCDQRLEPVHGAENVHILRVPFRYEDGRIHPHWISRFKVWPYLERYARDLEREVKAELGGRPDLIIGNYSDGNLVATILSEKLGVTQCNIAHALEKTKYPGSDLYWPKYEQDHHFACQFTADLIAMNAADIIITSTYQEIAGNDREVGQYESHQDYTLPGLYRVVNGIDVFDPKFNIVSPGADPSIYFSYSRKERRFSSLWPEIEELLFGREPGPDIRGVLEDPSKPIILSVARMDRIKNLSGLAELYGRNPRLRSLANLVIIGGHVDVQESMDAEEREEIRRMHEIMDRYQLDGQMRWVGSHLDKRVVGELYRVVADRRGVFVQPALFEAFGLTVIEAMSSGLPVFATRHGGPLEIIEDGVSGFHIDPNDPDAVAEKLADFFERARERPKYWEEISQAALQRVEERYTWERYAERLMTIARVYGFWRFVSSRERQVMRRYLQMFRHLQWRPLAHAVPME

SEQ ID NO: 927 - protein, 793 aa, Artificial Sequence
  engineered sucrose synthase encoded in plasmid pA32589
MIEVLRQQLKDSPNSWHAFLRHLVASQRGFWLHTDLQHACKTFREQPPEGYPEDIGPLADFIRHCQEAIFLDPWMVFAWRERPGVWEYVRIHVEQLAVEELSVDEYLQAKEELVDGGAEGEAVLTVDFEDFRPVSQRLKDESTIGNGLQHLNRHLAGRIWTDLKDGRSAILEFLRLHRLDGQQLMLSDRIQDFDSLRQTLQYLGTLPRDTPWAEFREDMRRRGFEPGWGNTAGRVRETMRLLMDLLDSPSPAALEKFLARIPMISNVLIVSIHGWFAQDNVLGRPDTGGQVVYILDQARALEREMRRRLRQQGVDVEPRILIATRLIPESKGTTCDQRLEPVHGAENVHILRVPFRYEDGRIHPHWISRFKVWPYLERYARDLEREVLAELGGRPDLIIGNYSDGNLVATILSEKLGVTQCNIAHALEKTKYPGSDLYWPKYEQQYHFACQFTADLIAMNAADIIITSTYQEIAGNDREVGQYESHQDYTLPGLYRVVNGIDVFDPKFNIVSPGADPSIYFSYSRKERRFSSLWPEIEELLFGREPGPDIRGVLEDPSKPIILSVARMDRIKNLSGLAELYGRNPRLRSLANLVIIGGHVDVQKSMDAEEREEIRRMHEIMDRYQLDGQMRWIGSHLDKRVVGELYRVVADRRGVFVQPALFEAFGLTVIEAMSSGLPVFATRHGGPLEIIEDGVSGFHIDPNDPDAVAEKLADFFERAREDPKYWEEISQAALQRVEERYTWERYAERLMTIARVYGFWRFVSSRERQVTRRYLQMFRHLQWRPLAHAVPME

SEQ ID NO: 928 - protein, 793 aa, Artificial Sequence
  engineered sucrose synthase encoded in plasmid pA32591
MIEVLRQQLLDHPNSWRAFLRHLVASQRGLWLHTDLQHECKTFREQPPEGYPEDIGPLADFIAHCQEAIFLDPWMYFAWRLRPGVWEYVRIHVEQLAVEELSVDEYLQAKEQLVGGGAEGEAVLTVDFEDFRPVSQRLKDESTIGDGLTHLNRHLAGRIWTDLAKGRSAILEFLRLHRLDGQQLMLSDRITDFDSLRQTVQYLGTLPPETPWAEFEEDMRRRGFEPGWGNTAGRVRETMRLLMDLLDSPSPAALESFLDRIPMISNVLIVSIHGWFAQDNVLGRPDTGGQVVYILDQARALEREMRNRLRQQGVDVEPRILIATRLIPESDGTTCDQRLEPVHGAEHVWILRVPFRYEDGRIHPHWISRFKVWPYLERYARDLEREVKAELGGRPDLIIGNYSDGNLVATILSEKLGVTQCNIAHALEKSKYPGSDLHWPDYEQDYHFACQFTADLIAMNAADIIVTSTYQEIAGNDREVGQYESHQDYTLPGLYRVENGIDVFDPKFNIVSPGADPSVYFSYTRKEERFSSLHPEIESLLFGREPGPDIRGVLEDPQKPIILSVARMDRIKNLSGLAELYGRSPRLRSLANLVIIGGHVDVQASMDAEEREEIRRMHEIMDRYQLDGQMRWVGSHLDKRRVGELYRVVADTRGVFVQPALFEAFGLTVIEAMSSGLPVFATRHGGPLEIIEDGVSGFHIDPNDPEAVAEKLADFLERARERPKYWEEISQAALARVSERYTWERYAERLMTIARVFGFWRFVLSRERQVMERYLQMFRHLQWRPLAHAVPME

SEQ ID NO: 929 - protein, 793 aa, Artificial Sequence
  engineered sucrose synthase encoded in plasmid pA32594
MIEVLRQQLLDHPNSWRAFLRHLVASQRGLWLHTDLQHECETFREQPPEGYPEDIGALADFIAHCQEAIFLDPWMYFAWRLRPGVWEYVRIHVEQLAVEELSVDEYLQAKEQLVKGGAEGEAVLTVDFEDFRPVSQRLKDESTIGNGLEHLNRHLAGRIWGDLAEGRSAILEFLRLHRLDGQNLMLSDRITDFDELRQALQYLGTLPPDTPWAEFREDMRRLGFEPGWGNTAQRVRETMRLLMDLLDSPSPAALEKFLDRIPMISNVLIVSIHGWFAQDNVLGRPDTGGQVVYILDQARALEREMRNRLRQQGVDVEPRILIATRLIPEADGTTCDQRLEPVHGTENVWILRVPFRYEDGRIHPHWISRFKVWPYLERYARDLEREVKAELGGRPDLIIGNYSDGNLVATILSEKLGVTQCNIAHALEKTKYPGSDLYWPKYEQQYHFACQFTADLIAMNAADIIITSTYQEIAGNDREVGQYESHQDYTLPGLYRVVNGIDVFDPKFNIVSPGADPSIYFSYSRKEERFSSLWPEIEELLFGREPGPDIRGVLEDPSKPIILSVARMDRIKNLSGLAELYGRSARLRELANLVIIGGHVDVQKSMDAEEREEIRRMHEIMDRYQLDGQMRWVGSHLDKRVVGELYRYVADKRGVFVQPALFEAFGLTVIEAMSSGLPVFATRHGGPLEIIEDGVSGFHIDPNDPEAVAEKLADFFERARERPKYWEEISQAALARVSERYTWERYAERLMTIARVYGFWRFVSSRESQVMERYLQMFRHLQWRPLAHAVPME

SEQ ID NO: 930 - protein, 793 aa, Artificial Sequence
  engineered sucrose synthase encoded in plasmid pA32595
MIEVLRQQLKDHPNAWRAFLRHLVASQRGLWLHTDLQHECETFREQPPEGYPEDNGALAEFIRHCQEAIFLDPWVYFAWRERPGVWEYVRIHVEQLAVEELSVDEYLQAKEELVDGGAEGEAVLTVDFEDFRRVSQRLKDESTIGNGLQHLNRHLAGRIWGDLRDGRRAILDFLRLHRIDGQNLMLSDRIQDFDALRQALQYLGKLPPDTPWSEFEEDMRRLGFEPGWGRTAQRVRETMRLLMDLLDSPSPATLEKFLDRIPMISNVLIVSIHGWFAQDNVLGRPDTGGQVVYILDQARALEREMRRRLREQGVDVEPRILIATRLIPDADGTTCDQRLEPVHGTENVWILRVPFRYEDGRIHPHWISRFKVWPYLERFARDLEREVLAELGGRPDLIIGNYSDGNLVATILSEKLGVTQCNIAHALEKTKYPGSDLYWPKYEEQYHFACQFTADLIAMNAADIIITSTYQEIAGNDNEVGQYESHQDYTLPGLYRVVHGIDVFDPKFNIVSPGADPSIYFSYSRKEERLSSLWPEIEELLFGREPGPDIRGVLKDPSKPIILSVARMDRIKNLSGLAELYGRSARLRELANLVIIGGHIDVKKSMDREEREEIRRMHEIMDEYNLDGQMRWIGSHLDKRVVGELYRYVADRRGVFVQPALFEAFGLTVIEAMASGLPVFATRHGGPLEIIEDGVSGFHIDPNDPEQVAEKLADFFERAREDPDYWEEISQAALKRVEERYTWERYAERLMTIARVYGFWRFVSSRERQVMERYLQMFRHLQWRPLAHAVPME

SEQ ID NO: 931 - protein, 793 aa, Artificial Sequence
  engineered sucrose synthase encoded in plasmid pA32596
MIEVLRQQLLDHPNAWRAFLRHLVASQRGLWLHTDLQHECETFREQPPEGYPEDNGALADFIKHCQEAIFLDPWVYFAWRLRPGVWEYVRIHVEQLAVEELSVDEYLQAKEELVDGGAEGEAVLTVDFEDFRRVSQRLKDESTIGNGLQHLNRHLAGRIWGDLKEGRNAILEFLRLHRLDGQNLMLSDRIQDFDQLRQALQYLGTLPPDTPWSEFEEDMRRLGFEPGWGNTAQRVRETMRLLMDLLDSPSPATLEKFLDRIPMISNVLIVSIHGWFAQDNVLGRPDTGGQVVYILDQARALEREMRNRLRQQGVDVEPRILIATRLIPEADGTTCDQRLEPVHGTENVWILRVPFRYEDGRIHPHWISRFKVWPYLERYARDLEREVLAELGGRPDLIIGNYSDGNLVATILSEKLGVTQCNIAHALEKTKYPGSDLYWPKYEEQYHFACQFTADLIAMNAADIIITSTYQEIAGNDNEVGQYESHQDYTLPGLYRVVHGIDVFDPKFNIVSPGADPSIYFSYSRKEERFSSLWPEIEELLFGREPGPDIRGVLEDPSKPIILSVARMDRIKNLSGLAELYGRSARLRELANLVIIGGHVDVQKSMDAEEREEIRRMHEIMDRYQLDGQMRWVGSHLDKRVVGELYRYVADRRGVFVQPALFEAFGLTVIEAMTSGLPVFATRHGGPLEIIEDGVSGFHIDPNDPEAVAEKLADFFERAREDPKYWEEISQAALQRVYERYTWERYAERLMTIARVYGFWRFVTSRESQVMERYLQMFRHLQWRPLAHAVPME

SEQ ID NO: 932 - protein, 793 aa, Artificial Sequence
  engineered sucrose synthase encoded in plasmid pA32600
MIEVLRQQLLDHPRAWRAFLRHLVASQRGIWLHHDLQHECENFREQPPEGYLEMTGPLAEFIKHCQEAIFLDPWMYFAWRERPGVWEYVRIHVEQLAVEELSVSEYLQAKEELVDGGSEGEAVLEVDFEDFRRVSQRLKDESTIGNGVQHLNRHLAGRLWTDLKEGMSAILEFLRLHRLDGQQLMLSDRIQDFDSLRQALQYLGTLPRDTPWSEFEEEMRRLGFEPGWGDTAGRVRETMRLLMDLLDSPSPAALEKFLDRIPMISNVLIVSIHGYFGQDNVLGRPDTGGQVVYILDQARALEREMRDRLRQQGVDVEPRILIATRLIPEADGTTCDQRLEPVHGTEHVWILRVPFRYEDGRIHPHWISRFKVWPYLERYARDLEREVLAELGGRPDLIIGNYSDGNLVATILSEKLGVTQCNIAHALEKTKYPGSDLYWRKYEEQYHFACQFTADLIAMNAADIIITSTYQEIAGNDNEVGQYESHQAYTLPGLYRVVNGIDVFDPKFNIVSPGADPSIYFPYSRKERRFSSLHPEIERLLFGREPGPEIRGVLEDPSKPIILSVARMDRIKNLSGLAEWYGRNARLRELANLVIIGGHIDVQKSMDREEREEIRRMHEIMDRYNLDGQMRWVGSHLDKRRVGELYRVVADTRGVFVQPALFEAFGLTVIEAMASGLPVFATRHGGPAEIIEDGVSGFHIDPNDPDAVAEKLADFFERAREDPDYWEEISQAALQRVYERYTWERYAERLMTIARVYGFWKFVSSRERQVTRRYLQMFRHLQWRPLAHAVPME

SEQ ID NO: 933 - protein, 793 aa, Artificial Sequence
  engineered sucrose synthase encoded in plasmid pA32601
MIEVLRQQLLDHPRSWRAFLRHLVASQRGIWLHTDLQHECKTFREQPPEGYLEDIGPLADFIRHCQEAIFLDPWMYFAWRLRPGVWEYVRIHVEQLAVEELSVSEYLQAKEQLVDGGAEGEAVLTVDFEDFRRVSQRLKDESTIGNGVEHLNRHLAGRIWTDLKEGRSAILEFLRLHRLDGQQLMLSDRITDFDSLRQAVQYLGTLPRDTPWAEFREDMRRRGFEPGWGNTAGRVRETMRLLMDLLDSPSPAALEKFLDRIPMISNVLIVSIHGWFAQDNVLGRPDTGGQVVYILDQARALEREMRNRLRQQGVDVEPRILIATRLIPEADGTTCDQRLEPVHGTENVWILRVPFRYEDGRIHPHWISRFKVWPYLERYARDLEREVKAELGGRPDLIIGNYSDGNLVATILSEKLGVTQCNIAHALEKTKYPGSDLYWKKYEQQYHFACQFTADLIAMNAADIIITSTYQEIAGNDREVGQYESHQDYTLPGLYRVENGIDVFDSKFNIVSPGADPSIYFSYSRKEERFSSLWPEIESLLFGREPGPDIRGVLEDPSKPIILSVARMDRIKNLSGLAEWYGRSARLRSLANLVIIGGHIDVQKSMDAEEREEIRRMHEIMDRYQLDGQMRWVGSHLDKRRVGELYRVVADTRGVFVQPALFEAFGLTVIEAMSSGLPVFATRHGGPLEIIEDGVSGFHIDPNDPEAVAEKLADFFERARERPKYWEEISQAALQRVEERYTWERYAERLMTIARVFGFWKFVTSRERQVMERYLQMFRHLQWRPLAHAVPME

SEQ ID NO: 934 - protein, 793 aa, Artificial Sequence
  engineered sucrose synthase encoded in plasmid pA32602
MIEVLRQQLLDHRREWRAFLRHLVASQRGIWLHTDLQHACKTFREQPPEGYPEDIGPLADFIKHCQEAIFRDPWMVFAWRLRPGVWEYVRIHVEQLAVEELSTDEYLQAKEQLVDGGAEGEAVLTVDFEDFRRVSQRLKDESTIGDGLTHLNRHLAGRIWTDLAAGRYQILEFLRLHRIDGQNLMLSDRMTDFDSLRQALQYLGTLPPETPWAEFREEMRRRGFEPGWGNTAGRVRETMRLLMDLLDSPSPAALESFLARIPMISNVLIVSIHGWFAQDNVLGRPDTGGQVVYILDQARALEREMRNRLRQQGVDVEPRILIATRLIPEADGTTCDQRLEPVHGAENVQILRVPFRYEDGRIHPHWISRFKVWPYLERYARDLEREVKAELGGRPDLIIGNYSDGGLVATILSEKLGVTQCNIAHALEKTKYPGSDLYWPKYEQDYHFACQFTADLIAMNAADIIITSTYQEIAGNDDEVGQYESHQDYTLPGLYRVENGIDVFDPKFNIVSPGADPSIYFSYTRKEERFSSLHPEIESLLFGREPGPDIRGVLEDPSKPIILSVARMDRIKNLSGLAELYGRSARLRELANLVIIGGHVDVQASMDAEEREEIRRMHEIMDRYQLDGQMRWVGSHLDKRRVGELYRVVADRRGVFVQPALFEAFGLTVIEAMSSGLPVFATRHGGPLEIIEDGVSGFHIDPNDPEAVAEKLADFFERARERPKYWEEISQAALARVSERYTWERYAERLMTIARCFGFWRFVLSRESQVMERYLQMFRHLQWRPLAHAVPME

SEQ ID NO: 935 - protein, 793 aa, Artificial Sequence
  engineered sucrose synthase encoded in plasmid pA32603
MIEVLRQQLEDHRREWRAFLRHLVASGRGIWLHHDLQHECETFREQPPLGYLEDNGPLAEFIKHCQEAIVLDPWIVFAWRLRPGVWEYVRIHVEQLDVEELSVDEYLQAKEQLVDGGAEGEAVLTVDFEDFRRTSQRLKDESTIGNGLQHLNRHLAGRLWTDLKEGREALLEFLRLHRIDGQNLMLSDRMQSFDSLRQALQYLGTLPPDTPWSEFEEEMRRLGFEPGWGRTAGRVRETMRLLMDLLDSPSPATLEKFLARIPMISNVLIVSPHGWFGQDNVLGRPDTGGQVVYILDQARALEREMRERLRQQGVDVEPRILIVTRLIPEADGTTCDQRLEPVHGAEHVHILRVPFRYEDGRIHPHWISRFKVWPYLERFAQDVEREVLAELGGRPDLIIGNYSDGNLVATLLSEKLGVTQCNIAHALEKTKYPGSDLYWPKYEEQYHFACQFTADLIAMNAADIIITSTYQEIAGNDDEVGQYESHQDYTLPGLYRVVHGIDVFDPKFNIVSPGADPSIYFSYSRKEERLSSLHPEIEELLYGREPGPDIRGVLEDPDKPIILSVARMDRIKNLSGLAELYGRSARLRELANLVIIGGHVDVQKSNDREEREEIRRMHEIMDRYNLDGQMRWVGAHLDKRRVGELYRVVADRRGVFVQPALFEAFGLTVIEAMASGLPVFATRHGGPLEIIEHGVSGFHIDPNDPEAVAEKLADFFERAREDPKYWEEISQAALQRVYERYTWELYAERLMTIARIYGFWRYVLSRERQVTERYLQMFRHLQWRPLAHAVPME

SEQ ID NO: 936 - protein, 793 aa, Artificial Sequence
  engineered sucrose synthase encoded in plasmid pA32605
MIEVLRQQLLDHRREWRAFLRHLVASQRGIWLHTDLQHECETFREQPPEGYPEDIGPLADFIKHCQEAIFLDPWMVFAWRLRPGVWEYVRIHVEQLAVEELSVDEYLQAKEQLVDGGAEGEAVLTVDFEDFRRVSQRLKDESTIGDGLEHLNRHLAGRIWTDLKAGRYQILEFLRLHRIDGQNLMLSDRMTDFDSLRQALQYLGTLPPETPWAEFREEMRRRGFEPGWGRTAGRVRETMRLLMDLLDSPSPAALEKFLARIPMISNVLIVSPHGWFAQDNVLGRPDTGGQVVYILDQARALEREMRERLRQQGVDVEPRILIATRLIPEADGTTCDQRLEPVHGAENVHILRVPFRYEDGRIHPHWISRFKVWPYLERYARDLEREVKAELGGRPDLIIGNYSDGNLVATILSEKLGVTQCNIAHALEKTKYPGSDLYWPKYEQQYHFACQFTADLIAMNAADIIITSTYQEIAGNDDEVGQYESHQDYTLPGLYRVVHGIDVFDPKFNIVSPGADPSIYFSYTRKEERFSSLHPEIESLLFGREPGPDIRGVLEDPDKPIILSVARMDRIKNLSGLAELYGRSARLRELANLVIIGGHVDVQKSNDAEEREEIRRMHEIMDRYQLDGQMRWVGSHLDKRRVGELYRVVADRRGVFVQPALFEAFGLTVIEAMSSGLPVFATRHGGPLEIIEHGVSGFHIDPNDPEAVAEKLADFFERARERPKYWEEISQAALQRVEERYTWERYAERLMTIARIYGFWRFVLSRERQVMERYLQMFRHLQWRPLAHAVPME

SEQ ID NO: 937 - protein, 793 aa, Artificial Sequence
  engineered sucrose synthase encoded in plasmid pA32606
MIEVLRQQLSDHPRSWYAFLRHLVASQRGLWLHTDLQHEFKHFREQPPEGYPEDIGWLADFVEHCQEAIFLDPWMYFAWRERPGVWEYVRIHVEQLAVEELSVDEYLQAKEQLVDGGAEGEAVLTVDFEDFRRVSQRLKDESTIGNGVQHLNRHLAGRIWTDLKEGRDAILEFLRLHRLDGQQLMLSDRITDFDSLRQALQYLGTLPPDTPWAEFREDMRRLGFEPGWGNTAGRVRETMRLLMDLLDSPSPAALEKFLARIPMISNVLIVSIHGWFAQDNVLGRPDTGGQVVYILDQARALEREMRNRLRQQGVDVEPRILIATRLIPESDGTTCDQRLEPVHGTEHVWILRVPFRYEDGRIHPHWISRFKVWPYLERYARDLEREVKAELGGRPDLIIGNYSDGNLVATILSEKLGVTQCNIAHALEKTKYPGSDLYWKKYEQQYHFACQFTADLIAMNAADIIITSTYQEIAGTDREVGQYESHQDYTLPGLYRVENGIDVFDPKFNIVSPGADPSIYFPYSRKEERFSSLWPEIESLLFGREPGPDIRGVLEDPSKPIILSVARMDRIKNLSGLAEWYGRNPRLRSLANLVIIGGHVDVQASMDAEEREEIRRMHEIMDRYQLDGQMRWVGSHLDKRRVGELYRVVADTRGVFVQPALFEAFGLTVIEAMSSGLPVFATRHGGPLEIIEDGVSGFHIDPNDPEAVAEKLADFFERARERPKYWEEISQAALQRVEERYTWERYAERLMTIARCYGFWKFVLSRERQVMERYLQMFRHLQWRPLAHAVPME

SEQ ID NO: 938 - protein, 793 aa, Artificial Sequence
  engineered sucrose synthase encoded in plasmid pA32608
MIEVLRQQLSDHPRSWYAFLRHLVASQRGFWLHHDLQHEFKHFREQPPEGYPEDIGWLADFVEHCQEAIFLDPWMYFAWRERPGVWEYVRIHVEQLAVEELSVDEYLQAKEELVDGGAEGEAVLTVDFEDFRRVSQRLKDESTIGNGVQHLNRHLAGRIWGDLKEGREAILEFLRLHRLDGQQLMLSDRIQDFDSLRQALQYLGTLPPDTPWSEFREEMRRLGFEPGWGDTAGRVRETMRLLMDLLDSPSPAALEKFLARIPMISNVLIVSIHGWFAQDNVLGRPDTGGQVVYILDQARALEREMRNRLRQQGVDVEPRILIATRLIPESDGTTCDQRLEPVHGTEHVWILRVPFRYEDGRIHPHWISRFKVWPYLERYARDLEREVKAELGGRPDLIIGNYSDGNLVATILSEKLGVTQCNIAHALEKTKYPGSDLYWRKYEEQYHFSCQFTADLIAMNAADIIITSTYQEIAGTDREVGQYESHQDYTLPGLYRVEHGIDVFDPKFNIVSPGADPSIYFPYSRKEERFSSLWPEIEELLFGREPGPDIRGVLEDPSKPIILSVARMDRIKNLSGLAEWYGRNPRLRELANLVIIGGHVDVQKSNDAEEREEIRRMHEIMDRYQLDGQMRWVGSHTDKRRVGELYRVVADTRGVFVQPALFEAFGLTVIEAMSSGLPVFATRHGGPLEIIEDGVSGFHIDPNDPDAVAEKLADFFERAREDPKYWEEISQAALQRVEERYTWELYAERLMTIARCYGFWKFVLSRERQVMRRYLQMFRHLQWRPLAHAVPME

SEQ ID NO: 939 - protein, 793 aa, Artificial Sequence
  engineered sucrose synthase encoded in plasmid pA32609
MIEVLRQQLLDHPRSWYAFLRHLVASQRGFWLHTDLQHEFKTFREQPPEGYPEDIGWLADFVEHCQEAIFLDPWMYFAWRLRPGVWEYVRIHVEQLAVEELSVDEYLQAKEQLVGGGAEGEAVLTVDFEDFRPVSQRLKDESTIGDGLEHLNRHLAGRIWTDLAEGRDAILEFLRLHRLDGQNLMLSDRITDFDSLRQAVQYLGTLPPETPWAEFREDMRRMGFEPGWGNTAGRVRETMRLLMDLLDSPSPAALEKFLARIPMISNVLIVSIHGWFAQDNVLGRPDTGGQVVYILDQARALEREMRNRLRQQGVDVEPRILIATRLIPESDGTTCDQRLEPVHGTENVWILRVPFRYEDGRIHPHWISRFKVWPYLERYARDLEREVKAELGGRPDLIIGNYSDGGLVATILSEKLGVTQCNIAHALEKTKYPGSDLYWKKYEQDYHFACQFTADLIAMNAADIIITSTYQEIAGTDREVGQYESHQDYTLPGLYRVENGIDVFDPKFNIVSPGADPSIYFPYSRHEERFSSLWPEIESLLFGREPGPDIRGVLEDPQKPIILSVARMDRIKNLSGLAEWYGRNPRLRSLANLVIIGGHVDVQASMDAEEREEIRRMHEIMDRYQLDGQMRWVGSHLDKRRVGELYRVVADGRGVFVQPALFEAFGLTVIEAMSSGLPVFATRHGGPLEIIEDGVSGFHIDPNDPEAVAEKLADFFERARERPKYWEEISQAALARVSERYTWERYAERLMTIARCYGFWRFVLSRERQVMERYLQMFRHLQWRPLAHAVPME

SEQ ID NO: 940 - protein, 793 aa, Artificial Sequence
  engineered sucrose synthase encoded in plasmid pA32614
MIEVLRQQLLDSPRSWRAFLRHLVASQRGLWLHHDLQHALKTFREQPPEGYPEDIGPLADFIAHCQEAIFRDPWMVFAWRLRPGVWEYVRIHVEQLAVEELSTDEYLQAKEQLVGGGAEGEAVLTVDFEDFRPVSQRLKDESTIGDGLEHLNRHLAGRIWTDLAEGRSRILEFLRLHRLDGQNLMLSDRITDFDSLRQTLQYLGTLPRETPWAEFREEMRRRGFEPGWGNTAGRVRETMRLLMDLLDSPSPAALETFLDRIPMISNVLIVSIHGWFAQDNVLGRPDTGGQVVYILDQARALEREMRNRLRQQGVDVEPRILIATRLIPESDGTTCDQRLEPVHGTENVHILRVPFRYEDGRIHPHWISRFKVWPYLERYARDLEREVKAELGGRPDLIIGNYSDGNLVATILSEKLGVTQCNIAHALEKSKYPGSDLYWKKYEQDYHFACQFTADLIAMNAADIIITSTYQEIAGTDREVGQYESHQDYTLPGLYRVENGIDVFDPKFNIVSPGADPSIYFSYSRHEERFSSLWPEIESLLFGREPGPDIRGVLEDPQKPIILSVARMDRIKNLSGLAELYGRSARLRELANLVIIGGHVDVQASMDAEEREEIRRMHEIMDRYQLDGQMRWIGSHLDKRVVGELYRVVADKRGVFVQPALFEAFGLTVIEAMSSGLPVFATRHGGPLEIIEDGVSGFHIDPNDPEAVAEKLADFFERARERPKYWEEISQAALARVSERYTWERYAERLMTIARCYGFWRFVLSRERQVMERYLQMFRHLQWRPLAHAVPME

SEQ ID NO: 941 - protein, 793 aa, Artificial Sequence
  engineered sucrose synthase encoded in plasmid pA32616
MIEVLRQQLLDSPRSWRAFLRHLVASQRGLWLHHDLQHELETFREQPPEGYPEDNGPLADFIAHCQEAIFRDPWMVFAWRLRPGVWEYVRIHVEQLAVEELSVDEYLQFKEQLVGGGAEGEAVLTVDFEDFRPTSQRLKDESTIGNGVQHLNRHLAGRIWTDLAEGRSRILEFLRLHRLDGQNLMLSDRITDFDSLRQALQYLGTLPRETPWAEFREEMRRRGFEPGWGNTAGRVRETMRLLMDLLDSPSPAALESFLDRIPMISNVLIVSPHGWFAQDNVLGRPDTGGQVVYILDQARALEREMRNRLRQQGVDVEPRILIATRLIPESDGTTCDQRLEPVHGTENVHILRVPFRYEDGRIHPHWISRFKVWPYLERYARDLEREVKAELGGRPDLIIGNYSDGNLVATILSEKLGVTQCNIAHALEKTKYPGSDLYWKKYEQQYHFACQFTADLIAMNAADIIITSTYQEIAGTDREVGQYESHQDYTLPGLYRVVHGIDVFDPKFNIVSPGADPSIYFSYSRKEERFSSLWPEIESLLFGREPGPDIRGVLEDPSKPIILSVARMDRIKNLSGLAELYGRSARLRELANLVIIGGHVDVQKSMDAEEREEIRRMHEIMDRYQLDGQMRWIGSHLDKRVVGELYRFVADKRGVFVQPALFEAFGLTVIEAMSSGLPVFATRHGGPLEIIEDGVSGFHIDPNDPEAVAEKLADFFERARERPKYWEEISQAALQRVEERYTWERYAERLMTIARCYGFWRFVLSRERQVMERYLQMFRHLQWRPLAHAVPME

SEQ ID NO: 942 - protein, 793 aa, Artificial Sequence
  engineered sucrose synthase encoded in plasmid pA32620
MIEVLRQQLSDHPNTWRAFLRHLVASGRDFWLHHDLWDACKTFREQPPEGYPEDIGWLEEFIRHCQEAIFRDPWMVFAWRERPGVWEYVRIHVEQLTVEELSTDEYLQFKEQLVGGGAEGNAVLTVDFEDFRPHSQRLKDESTIGNGLTHLNRHLAGRMWTDLGKGRSALIEFLSLHRLDGQQLMLSDRITDFDALRQTLQYLGTLPRDTPWSEFREDMQRLGFEPGWGDTAERVRETMRLLMDLLDSPSPAALEKFLGRIPMISNVLIVSIHGWFGQDNVLGRPDTGGQVVYILDQARALEREMRRRLYQQGVDVEPRILIATRLIPDADGTTCDQRLEPVSGTENVHILRVPFRYEDGTIHPHWISRFKVWPYLERFARDLEREVLAELGGRPDLIIGNYSDGNLVATLLSEKLGVTQCNIAHALEKSKYPGSDLYWPKYEDQYHFACQFTADLIAMNAADIIITSTYQEIAGNDREVGQYESYQDYTLPGLYRVVNGIDVFDSKFNIVSPGADPSVYFPYTRKERRFSSLHPEIEKLLFGDEPGPDHRGVLEDPDKPIILSVARLDRIKNLSGLAEWYGRSNRLRELANLVIVGGHVDVQKSNDGEEREEIRRMHEIMDRYNLDGQMRWVGSHLDKNRVGELYRYVADKRGVFVQPALFEAFGLTVIEAMASGLPVFATRHGGPLEIIEDGVSGFHIDPNHPEAVAEKLADFLERARERPSYWEKISQAALQRVEERYTWERYAERLMTIARCFGFWRFVSSREHQVTERYLQMFRHLQWRPLAHAVPME

SEQ ID NO: 943 - protein, 793 aa, Artificial Sequence
  engineered sucrose synthase encoded in plasmid pA32622
MIEVLRQQLSDHPRSWRAFLRHLVASQRDIWLHTDLQHACKTFREQPPEGYPEDIGPLADFIAHCQEAIFRDPWMVFAWRLRPGVWEYVRIHVEQLAVEELSTDEYLQAKEQLVGLGAEGEAVLTVDFEDFRPGFQRLKDESTIGDGLEHLNRHLAGRMWTDLAAGDSAILEFLGLHRLDGQQLMLSNGNTDFDSLRQTVQYLGTLPEETPWAEFREDMRRRGFEPGWGRTAGRVRETMRLLMDLLDSPSPAALESFLDRIPMISNVLIVSIHGWFAQDNVLGRPDTGGQVVYILDQARALEREMRNRLRQQGVDVEPRILIATRLIPESDGTTCDQRLEPVHGTENVWILRVPFRYEDGRIHPHWISRFKVWPYLERYARDLEREVLAELGSRPDLIIGNYSDGNLVATILSQKLGVTQCNIAHALEKSKYPGSDLHWPLYEQDYHFACQFTADLIAMNAADIIVTSTYQEIAGNDREVGQYESHQDYTLPGLYRVVNGIDVFDPKFNIVSPGADPSIYFPYTRHEERFSSLHPEIESLLFGREPGPDIRGVLEDPDKPIILSVARMDRIKNLSGLAELYGRSARLRELANLVIIGGHVDVQASMDAEEREEIRRMHEIMDRYQLDGQMRWVGSHLDKRVVGELYRYVADTRGAFVQPALFEAFGLTVIEAMSSGLPVFATRHGGPLEIIEDGVSGFHIDPNDPEAVAEKIADFLEAARERPKYWEEISQAALARVSERYTWERYAERLMTIARVYGFWRFVLSRESQVMRRYLQMFRHLQWRPLAHAVPME

SEQ ID NO: 944 - protein, 793 aa, Artificial Sequence
  engineered sucrose synthase encoded in plasmid pA32623
MIEVLRQQLSDHPNSWRAFLRHLVASGRDIWLHHDLQDACETFREQPPEGYPEDIGALAEFIRHCQEAIFRDPWMVFAWRLRPGVWYYVRIHVEQLVVEELSTDEYLQFKERLVGLGQEGEAVLTVDFEDFRPGFQRLKDESTIGRGLEHLNRHLAGRMWTDLAAGDEKLLEFLGLHRLDGQQLMLSERNQDFDSLRQALQYLGKLPPDTPWSELEEDMRRRGFEPGWGRTAGRVRETMRLLMDLLDSPSPAALEKFLDRIPMISNVLIVSIHGWFAQDNVLGRPDTGGQVVYILDQARALEREMRRRLRQQGVDVEPRILIATRLIPDADGTTCDQRLEPVSGTENVWILRVPFRYEDGRIHPHWISRFKVWPYLERFARDLEREVLAELGGRPDLIIGNYSDGNLVATILSEKLGVTQCNIAHALEKSKYPGSDLYWRKYEEQYHFACQFTADLIAMNAADIIITSTYQEIAGTDDEVGQYESHQDYTLPGLYRVVNGIDVFDPKFNIVSPGADPSIYFPYTRKERRFSSLHPEIERLLYGREPGPPHRGVLKDPDKPIILSVARLDRIKNLSGLAELYGRSARLRELANLVIIGGHVDVEKSNDHEEREEIRRMHEIMDRYNLDGQMRWLGSHLDKRVVGELYRYVADTRGAFVQPALFEAFGLTVIEAMSSGLPVFATRHGGPAEIIEDGVSGFHIDPNHPDQVAEKMADFLERAREDPKYWEKISQAALQRVEERYTWERYAERLMTLARVYGFWRFVLKRESQVMRRYLQMFRHLQWRPLAHAVPME

SEQ ID NO: 945 - protein, 793 aa, Artificial Sequence
  engineered sucrose synthase encoded in plasmid pA32625
MIEVLRQQLLDNPNEWRAFLRHLVASQRDSWLHHDLWDACKTFREQPPEGYPEDIGWLADFIAHCQEAIFRDPWMVFAWRLRPGVWEYVRIHVEQLAVEELSTDEYLQFKEQLVTGGAEGEAVLTVDFEDFRPGFQRLKDESTIGDGLTHLNRHLAGRIWTDLGAGRSAILEFLRLHRLDGQQLMLSNRNTDFDSLRQTLQYLGTLPRETPWAEFREDMRRMGFEPGWGDTAGRVRETMRLLMDLLDSPSPAALESFLDRIPMISNVLIVSIHGWFAQDNVLGRPDTGGQVVYILDQARALEREMRNRLRQQGVDVEPRILIATRLIPESDGTTCDQRLEPVHGAENVHILRVPFRYEDGRIHPHWISRFKVWPYLERYARDLEREVKAELGGRPDLIIGNYSDGNLVATILSEKLGVTQCNIAHALEKSKYPGSDLYWPKYEQDYHFACQFTADLIAMNAADIIVTSTYQEIAGNDREVGQYESHQDYTLPGLYRVVNGIDVFDPKFNIVSPGADPSIYFSYSRHEKRFSSLHPEIERLLFGREPGPPIRGVLEDPQKPIILSVARMDRIKNLSGLAEWYGRSARLRELANLVIIGGHVDVQKSMDAEEREEIRRMHEIMDRYQLDGQMRWVGSHLDKRVVGELYRYVADGRGVFVQPALFEAFGLTVIEAMSSGLPVFATRHGGPLEIIEDGVSGFHIDPNHPEAVAEKLADFLEAAREDPKYWEKISQAALARVEERYTWERYAERLMTIARVYGFWRFVLSRERQVMERYLQMFRHLQWRPLAHAVPME

SEQ ID NO: 946 - protein, 793 aa, Artificial Sequence
  engineered sucrose synthase encoded in plasmid pA32629
MIEVLRQQLSDHPNSWRAFLRHLVASQRDSWLHTDLQDACDTFREQPPEGYPEDIGPLAEFIAHCQEAIFRDPWMVFAWRLRPGVWEYYRIHVEQLAVEELSTSEYLQFKEQLVGGGAEGEAVLTVDFEDFRPGSQRLKDESTIGDGLQHLNRHLAGRIWTDLGAGRYAILEFLGLHRLDGQQLMLSDRFTDFDSLRQTLQYLGRLPRETPWAEFREDLRRWGFEPGWGDTAERVRETMRLLMDLLDSPSPAALEKFLARIPMISNVLIVSIHGWFAQDNVLGRPDTGGQVVYILDQARALEREMRERLRQQGVDVEPRILIATRLIPEADGTTCDQRLEPVHGAENVQILRVPFRYEDGRIHPHWISRFKVWPYLERYARDLEREVKAELGGRPDLIIGNYSDGNLVATILSEKLGVTQCNIAHALEKSKYPGSDLHWKKYEQDYHFACQFTADLIAMNAADIIVTSTYQEIAGNDREVGQYESYQDYTLPGLYRVVNGIDVFDPKFNIVSPGADPSIYFSYSETEKRLSSLHPEIEKLLFGREPGPDHRGVLEDPQKPIILSVARLDRIKNLSGLAEWYGRSARLRELANLVIIGGHVDVQASTDGEEREEIKRMHEIMDRYQLDGQMRWVGSHLDKRRVGELYRYVADGRGVFVQPALFEAFGLTVIEAMSSGLPVFATRHGGPLEIIEDGVSGFHIDPNHPEAVAEKLADFLEKARERPKYWEKISQAALQRVEERYTWERYAERLMTIARVFGFWRFVLKRESQVMERYLQMFRHLQWRPLAHAVPME

SEQ ID NO: 947 - protein, 793 aa, Artificial Sequence
  engineered sucrose synthase encoded in plasmid pA32639
MIEVLRQQLSDHPNDWHAFLRHLVASQRDIWLHHDLQDACEDFREQPPEGYPEGIGALADFIAHCQEAIFRDPWMVFAWRLRPGVWEYVRIHVEQLAVEELSTDEYLQFKEQLVGGGPEGEAVLEVDFEDFRRGFQRMKDESTIGNGLQHLNRHLAGRLWTDLAGGRSKLLEFLGVHRLDGQNLMLSNRNTDFDSLRQVIQYLGTLPDETPWAEFREDMRRMGFEPGWGDTAGRVRETMRLLMDLLDSPSPAALEKFLARIPMISNVLIVSIHGWFAQDNVLGRPDTGGQVVYILDQARALEREMRERLRQQGVDVEPRILIATRLIPDSDGTTCDQRLEPVHGAENVWILRVPFRYEDGRIHPHWISRFKVWPYLERYAEDLEREVKAELGSRPDLIIGNYSDGNLVASLLSEKLGVTQCNIAHALEKSKYPGSDLYWPKYEQQYHFACQFTADLIAMNAADIIVTSTYQEIAGNDREVGQYESYQAFTLPGLYRVVNGIDVFDPKFNIVSPGADPSIYFSYSRTEERLSSLHPEIEKLLFGREPGPDIRGVLEDPDKPIILSVARMDRIKNLTGLAEWYGRNPRLRELANLVIIGGHVDVQKSTDREEREEIRRMHEIMDRYQLDGQMRWIGSHLDKRVVGELYRVVADHRGVFVQPALFEAFGLTVIEAMASGLPVFATRHGGPLEIIEHGVSGFHIDPNHPDAVAEKLADFLEAAREDPKYWEEISQAALQRVEERYTWERYAERLMTIARCYGFWRFVSSRERQVTERYLQMFRHLQWRPLAHAVPME

SEQ ID NO: 948 - protein, 793 aa, Artificial Sequence
  engineered sucrose synthase encoded in plasmid pA32650
MIEVLRQQLLDHPESWRAFLRHLVASGRDFWLHTDLQHAFKTFREQPPEGYPEDIGVLADFIAHCQEAIFRDPWMVFAWRLRPGVWEYVRIHVEQLAVEELSTDEYLQFKEQLVGGGAEGEAVLTVDFEDFRPGFQRLKDESTIGDGLTHLNRHLAGRLWTDLGKGRSKLLEFLGLHRHDGQNLMLSNGNTDFDSLRQTVQYLGTLPRETPWAEFREDMRRMGFEPGWGDTAERVRETMRLLMDLLDSPSPAALESFLARIPMISNVLIVSPHGWFAQDKVLGRPDTGGQVVYILDQARALEREMRNRLRQQGVDVEPRILIATRLIPESDGTTCDQRLEPVHGAENVHILRVPFRYEDGRIHPHWISRFKVWPYLERYARDLEREVLAELGSRPDLIIGNYSDGNLVATLLSEKLGVTQCNIAHALEKSKYPDSDLYWPKYEQDYHFACQFTADLIAMNAADIIITSTYQEIAGTDREVGQYESHQDYTLPGLYRVINGIDVFDPKFNIVSPGADPSVYFPYSRHEERFSSLWPEIESLLFGREPGPDIRGVLEDPQKPIILSVARMDRIKNLTGLAEWYGRSPRLRELANLVIVGGHVDVQASMDAEEREEIRRMHEIMDRYQLDGQMRWLGSHLDKRRVGELYRYVADRRGVFVQPALFEAFGLTVIEAMSSGLPVFATRHGGPLEIIEHGVSGFHIDPNDPEAVAEKLADFLEAAREEPKYWEEISQAALARVSERYTWERYAERLMTLARVYGFWRFVLSRERQVTRRYLQMFRHLQWRPLAHAVPME

SEQ ID NO: 949 - protein, 793 aa, Artificial Sequence
  engineered sucrose synthase encoded in plasmid pA32651
MIEVLRQQLSDHPRSWRAFLRHLVASGRPLWLHHDLQDACETFREQPPEGYPEDIGWLADFIQHCQEAIFRDPWMYFAWRLRPGVWEYVRIHVEQLAVEELSVSEYLQFKEQLVGGESEGEAVLTVDFEDFRPVSQRLKDESTIGDGLTHLNRHLAGRIWQDLAAGRSAILEFLGLHRLDGQHLMLSDGNTDFDSLRQTVQYLGTLPEETPWSEFREDLRRMGFEPGWGDTAGRVRETMRLLMDLLDSPSPAALEKFLGRIPMISNVLIVSIHGWFAQDNVLGRPDTGGQVVYILDQARALEREMRERLRQQGVDVEPRILIATRLIPESKGTTCDQRLEPVHGAENVWILRVPFRYEDGRIHPHWISRFKVWPYLERFAEDLEREVKAELGSRPDLIIGNYSDGGLVATILSEKLGVTQCNIAHALEKTKYPGSDLYWKKYEQKYHFACQFTADLIAMNAADIIVTSTYQEIAGNDREVGQYESHQAYTLPGLYRVVNGIDVFDSKFNIVSPGADPSIYFPYSRTEERFSSLHPEIEKLLFGREPGPDHRGVLEDPDKPIILSVARMDRIKNLSGLAELYGRSARLRELANLVIIGGHVDVQKSMDAEEREEIRRMHEIMDRYNLDGQMRWIGSHLDKRRVGELYRVVADRRGVFVQPALFEAFGLTVIEAMSSGLPVFATRHGGPLEIIEDGVSGFHIDPNDPEAVAEKLADFLEAAREDPKYWEKISQAALKRVEERYTWERYAERLMTIARCFGFWKFVLSRERQVMRRYLQMFRHLQWRPLAHAVPME

SEQ ID NO: 950 - protein, 793 aa, Artificial Sequence
  engineered sucrose synthase encoded in plasmid pA32652
MIEVLRQQLADHPRSWRAFLRHLVASGRPLWLHTDLQHACKTFREQPPEGYPEDIGWLADFIAHCQEAIFRDPWMYFAWRLRPGVWEYVRIHVEQLAVEELSTDEYLQFKEQLVGGGAEGEAVLTVDFEDFRPVSQRLKDESTIGDGLTHLNRHLAGRIWQDLAAGRSAILEFLGLHRLDGQHLMLSDGNTDFDSLRQTVQYLGTLPEETPWAEFREDLRRRGFEPGWGDTAGRVRETMRLLMDLLDSPSPAALESFLGRIPMISNVLIVSIHGWFAQDNVLGRPDTGGQVVYILDQARALEREMRNRLRQQGVDVEPRILIATRLIPESDGTTCDQRLEPVHGAENVHILRVPFRYEDGRIHPHWISRFKVWPYLERYAEDLEREVKAELGSRPDLIIGNYSDGGLVATILSEKLGVTQCNIAHALEKSKYPGSDLYWKKYEQKYHFACQFTADLIAMNAADIIVTSTYQEIAGNDREVGQYESHQAYTLPGLYRVVNGIDVFDSKFNIVSPGADPSIYFSYSRTEERFSSLHPEIERLLFGREPGPDIRGVLEDPDKPIILSVARMDRIKNLSGLAELYGRSARLRELANLVIIGGHVDVQASMDAEEREEIRRMHEIMDRYQLDGQMRWVGSHLDKRRVGELYRVVADRRGVFVQPALFEAFGLTVIEAMSSGLPVFATRHGGPLEIIEDGVSGFHIDPNDPEAVAEKLADFLEAARERPKYWEEISQAALARVSERYTWERYAERLMTIARCFGFWKFVLSRERQVMRRYLQMFRHLQWRPLAHAVPME

SEQ ID NO: 951 - protein, 793 aa, Artificial Sequence
  engineered sucrose synthase encoded in plasmid pA32655
MIEELRQQLLDHRRSWYALLRHLVASQRGMWLHTDLQDALKEFREQPPEGYPEDIGWLADFVAHTQEAIFLDPWMVFAIRLRPGVWEYVRIHVEQLAVEELSTDEYLQAKEQLVKGGAEGEAVLTVDFEDFRRVSQRLKDESTIGNGLTHLNRHLAGRLWTDLAEGRSQILEFLRLHRLDGQQLMLSDRIQDFDSLRQAVQYLGTLPRDTPWAEFEPDMRRRGFEPGWGDTAGRVRETMRLLMDLLDSPSPAALEKFLARIPMISNVLIVSIHGWFAQDNVLGRPDTGGQVVYILDQARALEREMRNRLRQQGVDVEPRILIATRLIPEADGTTCDQRLEPVHGAEHVWILRVPFRYEDGRIHPHWISRFKVWPYLERFAEDLEREVKAELGGRPDLIIGNYSDGNLVATLLSEKLGVTQCNIAHALEKTKYLYSDLHWKDHEQQYHFACQFTADLIAMNAADIIVTSTYQEIAGNDNEVGQYESHQDYTLPGLYRVEHGIDVFDPKFNIVSPGADPRIYFPYSRTEERFSSLWPEIEELLFGREPGPDIRGVLEDRSKPIILSMARMDRIKNLSGLAEWYGRSSRLRELANLVIIGGHVDVQNSSDREEREEIRRMHEIMDEYQLDGQMRWIGSQLDKTRVGELYRVVADRRGVFVQPALFEAFGLTVIEAMSSGLPVFATRHGGPLEIIEDGVSGFHIDPNDPEATAEKLADFFERARERPKYWEEISDAALQRVEERYTWERYAERLMTIARCYGFWKFVLSRERQVMRRYLQMFRHLQWRPLAHAVPME

SEQ ID NO: 952 - protein, 793 aa, Artificial Sequence
  engineered sucrose synthase encoded in plasmid pA32657
MIEELRQQLLDHRRSWYAFLRHLVASQRGMWLHTDLQDALKTFREQPPEGYPEDIGWLADFVAHTQEAIFLDPWMVFAIRLRPGVWEYVRIHVEQLAVEELSTDEYLQAKEQLVGGGAEGEAVLTVDFEDFRPVSQRLKDESTIGDGLTHLNRHLAGRLWTDLAEGRSQILEFLRLHRLDGQNLMLSDRITDFDSLRQTVQYLGTLPRETPWAEFEPDMRRRGFEPGWGNTAGRVRETMRLLMDLLDSPSPAALESFLDRIPMISNVLIVSIHGWFAQDNVLGRPDTGGQVVYILDQARALEREMRNRLRQQGVDVEPRILIATRLIPESDGTTCDQRLEPVHGAENVHILRVPFRYEDGRIHPHWISRFKVWPYLERFAEDLEREVKAELGGRPDLIIGNYSDGNLVATLLSEKLGVTQCNIAHALEKTKYLYSDLHWKDHEQDYHFACQFTADLIAMNAADIIVTSTYQEIAGNDREVGQYESHQDYTLPGLYRVENGIDVFDPKFNIVSPGADPRIYFPYSRTEERFSSLWPEIESLLFGREPGPDIRGVLEDRQKPIILSMARMDRIKNLSGLAEWYGRSSRLRSLANLVIIGGHVDVQNSSDAEEREEIRRMHEIMDEYQLDGQMRWLGSQLDKTRVGELYRVVADRRGVFVQPALFEAFGLTVIEAMSSGLPVFATRHGGPLEIIEDGVSGFHIDPNDPEATAEKLADFFEKARERPKYWEEISDAALARVSERYTWERYAERLMTIARCYGFWKFVLSRESQVMRRYLQMFRHLQWRPLAHAVPME

SEQ ID NO: 953 - protein, 793 aa, Artificial Sequence
  engineered sucrose synthase encoded in plasmid pA32659
MIEELRQQLLDHRRSWYALLRHYIASQRGMWLHTDLQDELEAFREQPPEGYPGDDGWLAEFVKHTQEAIFLDPWMVFAVRERPGVWEYVRIHVEQLAVEELSVDEYLQAKEELVDGGAEGEAVLEVDFEDFRRESQRLKDESTIGNGLQHLNRHLAGRLWTDLSQGRSQILNFLRLHRLDGQQLMLSDRIQDFDSLRQALQYLGTLPRDTPWSEFAHDMQRLGFEPGWGDTAGRVRETMRLLMDLLDSPSPAALEKFLARIPMISNVLIVSIHGWFGQDNVLGRPDTGGQVVYILDQARALEREMRNRLREQGVDVEPRILIATRLIPEADGTTCDQRLEPVSGAEHVWILRVPFRYEDGRIHPHWISRFKVWPYLERFAEDLEREVLAELGGRPDLIIGNYSDGNLVATLLSEKLGVTQCNIAHALEKTKYLYSDLYWRDFEDQYHFACQFTADLIAMNAADIIITSTYQEIAGNDNEVGQYESHQAYTLPGLYRVVHGIDVFDPKFNIVSPGADPRIYFPYSRKERRFTSLHPEIEELLFGREPGPDIRGVLEDRSKPIILSMARMDRIKNLSGLAEWYGRSSRLRELANLVIIGGHVDVQNSNDREEREEIRRMHEIMDEYNLDGQMRWIGAQLDKTRVGELYRVVADRRGVFVQPALFEAFGLTVIEAMASGLPVFATRHGGPLEIIEDGVSGFHIDPNDPEAAAEKLADFFERAREDPKYWEEISQAALQRVEERYTWERYAERLMTIARCYGFWKYVTSRERQVTRRYLQMFRHLQWRPLAHAVPME

SEQ ID NO: 954 - protein, 793 aa, Artificial Sequence
  engineered sucrose synthase encoded in plasmid pA32661
MIEELRQQLSDHPNSWYAFLRHYVASQRGIWLHTDLQRELKTFREPPPEGYPEDIPWLADFVRHTQEAIFLDPWMYFAWRERPGVWEYVRIHVEQLAVEELSVEEYLQAKEELVDGGAEGEAVLTVDFEDFRRVSQRLKDESTIGNGLQHLNRHLAGRIWTDLSQGRSQLLEFLRLHRLDGQQLMLSDRIQDFDSLRQALQYLGTLPRDTPWSEFEEDMRRRGFEPGWGDTAGRVRETMRLLMDLLDSPSPAALEKFLDRIPMISNVLIVSIHGYFAQDNVLGRPDTGGQVVYILDQARALEREMRERLRQQGVDVEPRILIATRLIPEADGTTCDQRLEPVSGAEHVQILRVPFRYEDGEIHPHWISRFKVWPYLERFAEDLEREVLAELGGRPDLIIGNYSDGNLVATLLSEKLGVTQCNIAHALEKTKYLYSDLYWRDHEQQYHFACQFTADLIAMNAADIIITSTYQEIAGNDNEVGQYESHQDYTLPGLYRVVHGIDVFDPKFNIVSPGADPRIYFPYSRKERRFSSLHPEIEELLFGREPGPEIRGVLEDRSKPIILTMARLDRIKNLSGLAEWYGRSPRLRELANLVIIGGHVDVQNSSDREEREEIRRMHEIMDEYNLDGQMRWIGAQLDKTRVGELYRVVADRRGVFVQPALFEAFGLTVIEAMASGLPVFATRHGGPLEIIEDGVSGFHIDPNDPDQAAEKLADFFERAREDPKYWEEISQAALQRVEERYTWERYAERLMTIARVYGFWRYVSKRERQVTRRYLQMFRHLQWRPLAHAVPME

SEQ ID NO: 955 - protein, 793 aa, Artificial Sequence
  engineered sucrose synthase encoded in plasmid pA32662
MIEELRQQLLDNPESWRAFLRHLVASQRGLWLHTDLQRACKTFREQPPEGYPEDIGWLADFVAHTQEAIFRDPWMYFAWRLRPGVWEYVRIHVEQLAVEELSVDEYLQAKEQLVDGGAEGEAVLTVDFEDFRRVSQRLKDESTIGDGLTHLNRHLAGRIWTDLAAGRSQLLEFLRLHRHDGQNLMLSDRIQDFDSLRQALQYLGTLPRDTPWAEFREDMRRRGFEPGWGDTAGRVRETMRLLMDLLDSPSPAALEKFLDRIPMISNVLIVSIHGWFAQDNVLGRPDTGGQVVYILDQARALEREMRNRLRQQGVDVEPRILIATRLIPESKGTTCDQRLEPVHGAENVWILRVPFRYEDGRIHPHWISRFKVWPYLERFAEDLEREVKAELGGRPDLIIGNYSDGNLVATLLSEKLGVTQCNIAHALEKSKYLYSDLHWKDHEQQYHFACQFTADLIAMNAADIIVTSTYQEIAGNDNEVGQYESHQAYTLPGLYRVVHGIDVFDSKFNIVSPGADPRIYFPYSRTEERFTSLWPEIESLLFGREPGPDIRGVLEDRSKPIILSMARMDRIKNLSGLAELYGRSSRLRELANLVIIGGHVDPQNSMDAEEREEIRRMHEIMDEYQLDGQMRWVGAQLDKTRVGELYRVVADRRGVFVQPALFEAFGLTVIEAMSSGLPVFATRHGGPLEIIEDGVSGFHIDPNDPEATAEKLADFFERARERPKYWEEISDAALARVEERYTWERYAERLMTIARVYGFWKFVLSRERQVTRRYLQMFRHLQWRPLAHAVPME

SEQ ID NO: 956 - protein, 793 aa, Artificial Sequence
  engineered sucrose synthase encoded in plasmid pA32663
MIEELRQQLLDNPNSWRAFLRHLVASQRGLWLHTDLQRECKTFREQPPEGYPEDIGWLAEFVKHTQEAIFRDPWMYFAVRLRPGVWEYVRIHVEQLAVEELSVDEYLQAKEELVDGGAEGEAVLTVDFEDFRRVSQRLKDESTIGNGVQHLNRHLAGRIWQDLSAGRSQLLEFLRLHRHDGQNMMLSDRIQDFDSLRQALQYLGTLPRDTPWSEFREDMRRRGFEPGWGDTAGRVRETMRLLMDLLDSPSPAALEKFLDRIPMISNVLIVSIHGWFAQDNVLGRPDTGGQVVYILDQARALEREMRNRLRQQGVDVEPRILIATRLIPESKGTTCDQRLEPVSGAENVWILRVPFRGEDGRIHPHWISRFKVWPYLERFAEDLEREVLAELGGRPDLIIGNYSDGNLVATLLSEKLGVTQCNIAHALEKTKYLYSDLYWKDHEDQYHFACQFTADLIAMNAADIIITSTYQEIAGNDNEVGQYESHQAFTLPGLYRVVHGIDVFDPKFNIVSPGADPRIYFPYSRTEERFTSLWPEIEELLFGREPGPDIRGVLEDRSKPIILSMARMDRIKNLSGLAELYGRSSRLRELANLVIIGGHVDPQNSMDAEEREEIRRMHEIMDEYQLDGQMRWIGAQLDKTRVGELYRVVADRRGVFVQPALFEAFGLTVIEAMSSGLPVFATRHGGPLEIIEDGVSGFHIDPNDPEAAAEKLADFFERAREDPKYWEEISDAALQRVYERYTWERYAERLMTIARVYGFWKYVLSRERQVTRRYLQMFRHLQWRPLAHAVPME

SEQ ID NO: 957 - protein, 793 aa, Artificial Sequence
  engineered sucrose synthase encoded in plasmid pA32664
MIEELRQQLLDNPDSWRAFLRHLVASQRGLWLHTDLQRACKTFREQPPEGYPEDIGWLADFVAHTQEAIFRDPWMYFAWRLRPGVWEYVRIHVEQLAVEELSVDEYLQAKEQLVDGGAEGEAVLTVDFEDFRRVSQRLKDESTIGDGLTHLNRHLAGRIWTDLAAGRSQILEFLRLHRHDGQVLMLSDRIQDFDSLRQTLQYLGTLPRETPWAEFREDMRRRGFEPGWGNTAGRVRETMRLLMDLLDSPSPAALESFLDRIPMISNVLIVSIHGWFAQDNVLGRPDTGGQVVYILDQARALEREMRNRLRQQGVDVEPRILIATRLIPESDGTTCDQRLEPVHGAENVWILRVPFRYEDGRIHPHWISRFKVWPYLERYAEDLEREVKAELGGRPDLIIGNYSDGNLVATLLSEKLGVTQCNIAHALEKSKYLYSDLHWPDHEQDYHFACQFTADLIAMNAADIIVTSTYQEIAGNDNEVGQYESHQAYTLPGLYRVEHGIDVFDSKFNIVSPGADPRIYFPYSRTEERFTSLWPEIESLLFGREPGPDIRGVLEDRSKPIILSMARMDRIKNLSGLAELYGRSSRLRELANLVIIGGHVDPQNSMDAEEREEIRRMHEIMDEYQLDGQMRWVGSQLDKTRVGELYRVVADRRGVFVQPALFEAFGLTVIEAMSSGLPVFATRHGGPLEIIEDGVSGFHIDPNDPEATAEKLADFFERARERPKYWEEISDAALARVSERYTWERYAERLMTIARVYGFWKFVLSRERQVTERYLQMFRHLQWRPLAHAVPME

SEQ ID NO: 958 - protein, 793 aa, Artificial Sequence
  engineered sucrose synthase encoded in plasmid pA32665
MIEELRQQLLDNPDEWRAFLRHLVASQRGLWLHHDLQRECETFREQPPEGYPEGQGWLAEFVKHTQEAIFRDPWMYFAWRERPGVWEYVRIHVEQLTVEELSVDEYLQAKEELVDGGAEGEAVLEVDFEDFRRSSQRLKDESTIGNGVQHLNRHLAGRIWQDLSAGRSQLLEFLRLHRHDGQQMMLSDRIQDFDSLRQALQYLGTLPRDTPWSEFEEDMRRRGFEPGWGDTAGRVRETMRLLMDLLDSPSPAALEKFLDRIPMISNVLIVSIHGWFGQDNVLGRPDTGGQVVYILDQARALEREMRRRLRQQGVDVEPRILIATRLIPEAKGTTCDQRLEPVSGAEHVWILRVPFRDEDGRIVPHWISRFKVWPYLERFAEDLEREVLAELGGRPDLIIGNYSDGNLVATLLSEKLGVTQCNIAHALEKTKYLYSDLYWKDHEDQYHFACQFTADLIAMNAADIIITSTYQEIAGNDNEVGQYESHQAYTLPGLYRVVHGIDVFDPKFNIVSPGADPRIYFPYSRKEKRFTSLHPEIEELLFGREPGPEHRGVLEDRSKPIILSMARMDRIKNLSGLAELYGRSSRLRELANLVIIGGHVDPKNSGDREEREEIRRMHEIMDEYNLDGQMRWIGAQLDKTRVGELYRVVADRRGVFVQPALFEAFGLTVIEAMASGLPVFATRHGGPLEIIEDGVSGFHIDPNDPEQAAEKLADFFERAREDPKYWEEISQAALQRVEERYTWERYAERLMTIARVYGFWKYVLKRERQVTRRYLQMFRHLQWRPLAHAVPME

SEQ ID NO: 959 - protein, 793 aa, Artificial Sequence
  engineered sucrose synthase encoded in plasmid pA32666
MIEELRQQLSDSRRAWYAFLRHLVASQRGLWLHTDLQRECETFREQPPEGYPEDGGWLADFVKHTQEAIFQDPWMVFAWRLRPGVWEYVRIHVEQLAVEELSVDEYLQAKEQLVDGGAEGEAVLTVDFEDFRPVSQRLKDESTIGNGLQHLNRHLAGRIWTDLAEGRSQLLEFLRLHRLDGQQLMLSDRIQDFDSLRQAVQYLGTLPRDTPWSEFREDMRRRGFEPGWGDTAGRVRETMRLLMDLLDSPSPAALEKFLDRIPMISNVLIVSIHGWFAQDNVLGRPDTGGQVVYILDQARALEREMRERLRQQGVDVEPRILIATRLIPESDGTTCDQRLEPVSGTEHVHILRVPFRYEDGEIHPHWISRFKVWPYLERYAEDLEREVLAELGGRPDLIIGNYSDGNLVATLLSEKLGVTQCNIAHALEKTKYLYSDLHWKDHEDQYHFACQFTADLIAMNAADIIITSTYQEIAGNDNEVGQYESHQDYTLPGLYRVVHGIDVFDPKFNIVSPGADPRIYFPYSRTEERFSSLHPEIEELLFGREPGPDHRGVLEDRSKPIILSMARMDRIKNLSGLAEWYGRSSRLRELANLVIIGGHVDVQNSMDREEREEIERMHEIMDEYQLDGQMRWVGAQLDKTRVGELYRYVADRRGVFVQPALFEAFGLTVIEAMSSGLPVFATRHGGPAEIIEDGVSGFHIDPNDPDATAEKLADFFERAREDPKYWEEISQAALQRVEERYTWERYAERLMTIARCYGFWRYVSSRERQVMERYLQMFRHLQWRPLAHAVPME

SEQ ID NO: 960 - protein, 793 aa, Artificial Sequence
  engineered sucrose synthase encoded in plasmid pA32667
MIEELRQQLLDSPRSWRAFLRHLVASQRGFWLHTDLQRACKTFREQPPEGYPEDIGWLADFVAHTQEAIFHDPWMVFAWRLRPGVWEYVRIHVEQLAVEELSVDEYLQAKEQLVGGGAEGEAVLTVDFEDFRPVSQRLKDESTIGDGLTHLNRHLAGRIWTDLAAGRSQILEFLRLHRLDGQQLMLSDRIQDFDSLRQAVQYLGTLPRETPWAEFREDMRRRGFEPGWGNTAGRVRETMRLLMDLLDSPSPAALESFLDRIPMISNVLIVSIHGWFAQDNVLGRPDTGGQVVYILDQARALEREMRNRLRQQGVDVEPRILIATRLIPESDGTTCDQRLEPVHGTENVHILRVPFRYEDGEIHPHWISRFKVWPYLERYAEDLEREVKAELGGRPDLIIGNYSDGNLVATLLSEKLGVTQCNIAHALEKSKYLYSDLHWKDHEQDYHFACQFTADLIAMNAADIIVTSTYQEIAGNDREVGQYESHQDYTLPGLYRVENGIDVFDPKFNIVSPGADPRIYFPYSRTEERFSSLHPEIESLLFGREPGPDIRGVLEDRQKPIILSMARMDRIKNLSGLAEWYGRSSRLRELANLVIIGGHVDVQNSMDAEEREEIRRMHEIMDEYQLDGQMRWVGSQLDKTRVGELYRVVADRRGVFVQPALFEAFGLTVIEAMSSGLPVFATRHGGPLEIIEDGVSGFHIDPNDPEATAEKLADFFERARERPKYWEEISDAALARVSERYTWERYAERLMTIARCYGFWRFVSSRESQVMERYLQMFRHLQWRPLAHAVPME

SEQ ID NO: 961 - protein, 793 aa, Artificial Sequence
  engineered sucrose synthase encoded in plasmid pA32668
MIEELRQQLSDSRRAWYAFLRHYVASQRGLWLHTDLQREFETFREQPPEGYPEDGGWLAEFVKHTQEAIFQDPWMVFAWRLRPGVWEYVRIHVEQLVVEELSVDEYLQAKEQLVDGGPEGEAVLEVDFEDFRRVSQRLKDESTIGNGLQHLNRHLAGRIWGDLRQGMSQLLEFLRLHRLDGQQLMLSDRIQDFDSLRRALQYLGTLPRDTPWSEFEEDMRRLGFEPGWGDTAGRVRETMRLLMDLLDSPSPATLEKFLDRIPMISNVLIVSIHGYFGQDNVLGRPDTGGQVVYILDQARALEREMRERLRQQGVDVEPRILIATRLIPEADGTTCDQRLEPVSGTEHVHILRVPFRYENGEIHPHWISRFKVWPYLERFAEDLEREVLAELGGRPDLIIGNYSDGNLVATLLSEKLGVTQCNIAHALEKTKYLYSDLYWKDFEDQYHFACQFTADLIAMNAADIIITSTYQEIAGNDNEVGQYESHQDYTLPGLYRVVHGIDVFDPKFNIVSPGADPRIYFPYSRKERRFSSLHPEIEELLFGREPGPDHRGVLEDRSKPIILSMARMDRIKNLSGLAEWYGRSPRLRELANLVIIGGHVDVKNSNDREEREEIERMHEIMDEYQLDGQMRWVGAQLDKTRVGELYRYVADRRGVFVQPALFEAFGLTVIEAMASGLPVFATRHGGPAEIIEDGVSGFHIDPNDPDAAAEKLADFFERAREDPKYWEEISQAALQRVYERYTWERYAERLMTIARCYGFWKYVTKRERQVTERYLQMFRHLQWRPLAHAVPME

SEQ ID NO: 962 - protein, 793 aa, Artificial Sequence
  engineered sucrose synthase encoded in plasmid pA32669
MIEELRQQLSDSPRSWYAFLRHLVASQRGFWLHTDLQRECKTFREQPPEGYPEDGGWLADFVAHTQEAIFHDPWMVFAWRLRPGVWEYVRIHVEQLAVEELSVDEYLQAKEQLVDGGAEGEAVLTVDFEDFRPVSQRLKDESTIGNGLTHLNRHLAGRIWTDLAEGRSQILEFLRLHRLDGQQLMLSDRIQDFDSLRQAVQYLGTLPRDTPWAEFREDMRRRGFEPGWGDTAGRVRETMRLLMDLLDSPSPAALEKFLDRIPMISNVLIVSIHGWFAQDNVLGRPDTGGQVVYILDQARALEREMRNRLRQQGVDVEPRILIATRLIPESDGTTCDQRLEPVHGTEHVHILRVPFRYEDGEIHPHWISRFKVWPYLERYAEDLEREVKAELGGRPDLIIGNYSDGNLVATLLSEKLGVTQCNIAHALEKTKYLYSDLHWKDHEQQYHFACQFTADLIAMNAADIIVTSTYQEIAGNDNEVGQYESHQDYTLPGLYRVVHGIDVFDPKFNIVSPGADPRIYFPYSRTEERFSSLHPEIESLLFGREPGPDIRGVLEDRSKPIILSMARMDRIKNLSGLAELYGRSSRLRELANLVIIGGHVDVQNSMDAEEREEIRRMHEIMDEYQLDGQMRWVGAQLDKTRVGELYRVVADRRGVFVQPALFEAFGLTVIEAMSSGLPVFATRHGGPLEIIEDGVSGFHIDPNDPEATAEKLADFFERARERPKYWEEISDAALQRVEERYTWERYAERLMTIARCYGFWRFVSSRERQVMERYLQMFRHLQWRPLAHAVPME

SEQ ID NO: 963 - protein, 793 aa, Artificial Sequence
  engineered sucrose synthase encoded in plasmid pA32670
MIEELRQQLLDHPREWYAFLRHLVASQRGMWLHHDLQRECKEFREQPPEGYPEDIGWLAEFVEHTQEAIFRDPWMVFAWRLRPGVWEYVRIHVEQLAVEELSVDEYLQAKEELVDGGAEGEAVLEVDFEDFRRVSQRLKDESTIGNGLEHLNRHLAGRLWTDLARGLEQILEFLRLHRLDGQQLMLSDRIQDFDSLRQAVQYLGTLPPETPWSEFEEDMRRLGFEPGWGDTAGRVRETMRLLMDLLDSPSPAALEKFLDRIPMISNVLIVSIHGYFAQDNVLGRPDTGGQVVYILDQARALEREMRNRLRQQGVDVEPRILIATRLIPEADGTTCDQRLEPVHGTENVHILRVPFRYEDGRIHPHWISRFKVWPYLERFAEDLEREVLAELGGRPDLIIGNYSDGNLVATLLSEKLGVTQCNIAHALEKTKYLYSDLYWKDYEDQYHFACQFTADLIAMNAADIIITSTYQEIAGTDNEVGQYESHQAYTLPGLYRVVNGIDVFDPKFNIVSPGADPRIYFPYTRTERRFSSLHPEIERLLFGREPGPDIRGVLEDRSKPIILTMARMDRIKNLSGLAEWYGRSSRLRSLANLVIIGGHVDVQNSMDAEEREEIRRMHEIMDEYQLDGQMRWIGAQLDKTRVGELYRVVADTRGVFVQPALFEAFGLTVIEAMSSGLPVFATRHGGPLEIIEDGVSGFHIDPNDPDAVAEKLADFFERAREDPKYWEEISDAALKRVRERYTWERYAERLMTIARVYGFWRFVTKRERQVTRRYLQMFRHLQWRPLAHAVPME

SEQ ID NO: 964 - protein, 793 aa, Artificial Sequence
  engineered sucrose synthase encoded in plasmid pA32671
MIEELRQQLLDHPRSWYAFLRHLVASQRGMWLHTDLQRECKEFREQPPEGYPEDIGWLADFVAHTQEAIFRDPWMVFAWRLRPGVWEYVRIHVEQLAVEELSVDEYLQAKEQLVDGGAEGEAVLEVDFEDFRRVSQRLKDESTIGNGLTHLNRHLAGRIWTDLAAGRSQILEFLRLHRLDGQQLMLSDQITDFDSLRQAVQYLGTLPPETPWAEFEEDMRRLGFEPGWGDTAGRVRETMRLLMDLLDSPSPAALEKFLDRIPMISNVLIVSIHGWFAQDNVLGRPDTGGQVVYILDQARALEREMRNRLRQQGVDVEPRILIATRLIPEADGTTCDQRLEPVHGTENVHILRVPFRYEDGRIHPHWISRFKVWPYLERYAEDLEREVKAELGGRPDLIIGNYSDGNLVATLLSEKLGVTQCNIAHALEKTKYLYSDLHWKDHEQQYHFACQFTADLIAMNAADIIITSTYQEIAGTDNEVGQYESHQAYTLPGLYRVVNGIDVFDPKFNIVSPGADPRIYFPYSRTEERFSSLHPEIESLLFGREPGPDIRGVLEDRSKPIILSMARMDRIKNLSGLAEWYGRSSRLRSLANLVIIGGHVDVQNSMDAEEREEIRRMHEIMDEYQLDGQMRWIGAQLDKTRVGELYRVVADTRGVFVQPALFEAFGLTVIEAMSSGLPVFATRHGGPLEIIEDGVSGFHIDPNDPEAVAEKLADFFERARERPKYWEEISDAALARVSERYTWERYAERLMTIARVYGFWRFVTSRERQVTRRYLQMFRHLQWRPLAHAVPME

SEQ ID NO: 965 - protein, 793 aa, Artificial Sequence
  engineered sucrose synthase encoded in plasmid pA32672
MIEELRQQLLDHPRSWRAFLRHLVASQRGMWLHTDLQHACKTFREQPPEGYPEDIGWLADFVEHTQEAIFRDPWMVFAWRLRPGVWEYVRIHVEQLAVEELSVDEYLQAKEQLVDGGAEGEAVLEVDFEDFRRVSQRLKDESTIGNGLTHLNRHLAGRIWTDLAAGRSQILEFLRLHRLDGQNLMLSDQITDFDSLRQAVQYLGTLPPETPWAEFEEDMRRLGFEPGWGNTAGRVRETMRLLMDLLDSPSPAALESFLDRIPMISNVLIVSIHGWFAQDNVLGRPDTGGQVVYILDQARALEREMRNRLRQQGVDVEPRILIATRLIPESDGTTCDQRLEPVHGAENVYILRVPFRYEDGRIHPHWISRFKVWPYLERYAEDLEREVKAELGGRPDLIIGNYSDGNLVATLLSEKLGVTQCNIAHALEKTKYLYSDLHWKDHEQDYHFACQFTADLIAMNAADIIVTSTYQEIAGTDREVGQYESHQAYTLPGLYRVVNGIDVFDPKFNIVSPGADPRIYFPYRRTEERFSSLHPEIESLLFGREPGPDIRGVLEDRQKPIILSMARMDRIKNLSGLAEWYGRSSRLRSLANLVIIGGHVDVQNSMDAEEREEIRRMHEIMDEYQLDGQMRWIGSQLDKTRVGELYRVVADTRGVFVQPALFEAFGLTVIEAMSSGLPVFATRHGGPLEIIEDGVSGFHIDPNDPEATAEKLADFFERARERPKYWEEISDAALARVSERYTWERYAERLMTIARVYGFWRFVTSRERQVTRRYLQMFRHLQWRPLAHAVPME

SEQ ID NO: 966 - protein, 793 aa, Artificial Sequence
  engineered sucrose synthase encoded in plasmid pA32675
MIEELRQQLLDSRRSWRAFLRHLVASQRGLWLHTDLQRACKTFREQPPEGYPEDIGWLADFVAHTQEAIFRDPWMVFAWRLRPGVWEYVRIHVEQLAVEELSTDEYLQAKEQLVGGGAEGEAVLTVDFEDFRPVSQRLKDESTIGDGLTHLNRHLAGRIWTDLAAGRSQILEFLRLHRLDGQNLMLSDRITDFDSLRQALQYLGTLPRETPWAEFEEDMRRLGFEPGWGNTAGRVRETMRLLMDLLDSPSPAALESFLARIPMISNVLIVSIHGWFAQDNVLGRPDTGGQVVYILDQARALEREMRNRLRQQGVDVEPRILIATRLIPESDGTTCDQRLEPVHGTENVQILRVPFRNEDGRIHPHWISRFKVWPYLERYAEDLEREVKAELGGRPDLIIGNYSDGNLVATLLSEKLGVTQCNIAHALEKSKYLYSDLHWKDHEQDYHFACQFTADLIAMNAADIIVTSTYQEIAGNDNEVGQYESHQDYTLPGLYRVVNGIDVFDPKFNIVSPGADPRIYFPYSRTEERFSSLWPEIESLLFGREPGPDIRGVLEDRQKPIILSMARMDRIKNLSGLAEWYGRSSRLRSLANLVIIGGHVDVQNSMDAEEREEIRRMHEIMDHYQLDGQMRWVGSQLDKTRVGELYRVVADTRGVFVQPALFEAFGLTVIEAMSSGLPVFATRHGGPLEIIEDGVSGFHIDPNDPDATAEKLADFFERARERPKYWEEISDAALARVSERYTWERYAERLMTIARVYGFWRFVLSRERQVMERYLQMFRHLQWRPLAHAVPME

SEQ ID NO: 967 - protein, 793 aa, Artificial Sequence
  engineered sucrose synthase encoded in plasmid pA32678
MIEELRQQLLDHPNSWYAFLRHLVASQRGLWLHHDLQRECKTFREQPPEGYPETIGWLADFVEHTQEAIFRDPWMVFALRLRPGVWEYVRIHVEQLAVEELSVDEYLQAKEQLVDGGAEGEAVLTVDFEDFRRNSQRLKDESTIGNGLEHLNRHLAGRIWTDLAEGRSQILEFLRLHRLDGQQLMLSDRIQDFDSLRQAVQYLGTLPRDTPWSEFREEMRRRGFEPGWGDTAGRVRETMRLLMDLLDSPSPAALEKFLDRIPMISNVLIVSIHGWFAQDNVLGRPDTGGQVVYILDQARALEREMRERLRQQGVDVEPRILIATRLIPEADGTTCDQRLEPVSGAENVWILRVPFRYEDGRIHPHWISRFKVWPYLERFAEDLEREVLAELGGRPDLIIGNYSDGNLVATLLSEKLGVTQCNIAHALEKTKYLYSDLYWKDHEDQYHFACQFTADLIAMNAADIIVTSTYQEIAGNDREVGQYESHQDYTLPGLYRVVNGIDVFDPKFNIVSPGADPRIYFPYSRTEERFSSLWPEIEELLFGREPGPDIRGVLEDRSKPIILSMARMDRIKNLSGLAEWYGRSSRLRSLANLVIIGGHVDVQNSSDREEREEIRRMHEIMDEYQLDGQMRWIGSQLDKTRVGELYRVVADRRGVFVQPALFEAFGLTVIEAMTSGLPVFATRHGGPLEIIEDGVSGFHIDPNDPDATAEKLADFFERAREDPKYWEEISQAALQRVYERYTWERYAERLMTIARVYGFWRFVTSRERQVMERYLQMFRHLQWRPLAHAVPME

SEQ ID NO: 968 - protein, 793 aa, Artificial Sequence
  engineered sucrose synthase encoded in plasmid pA32680
MIEELRQQLLDHPNSWYAFLRHLVASQRGLWLHHDLQRECKTFREQPPEGYPETIGWLADFVAHTQEAIFRDPWMVFAVRLRPGVWEYVRIHVEQLAVEELSVDEYLQAKEQLVDGGAEGEAVLTVDFEDFRRHSQRLKDESTIGNGLTHLNRHLAGRIWTDLAAGRSQILEFLRLHRLDGQQLMLSDRITDFDSLRQTVQYLGTLPRDTPWAEFREDMRRRGFEPGWGDTAGRVRETMRLLMDLLDSPSPAALEKFLDRIPMISNVLIVSIHGWFAQDNVLGRPDTGGQVVYILDQARALEREMRNRLRQQGVDVEPRILIATRLIPEADGTTCDQRLEPVHGAENVWILRVPFRYEDGRIHPHWISRFKVWPYLERYAEDLEREVKAELGGRPDLIIGNYSDGNLVATLLSEKLGVTQCNIAHALEKSKYLYSDLHWKDHEQQYHFACQFTADLIAMNAADIIVTSTYQEIAGNDREVGQYESHQDYTLPGLYRVVNGIDVFDPKFNIVSPGADPRIYFPYSRTEERFSSLWPEIEELLFGREPGPDIRGVLEDRSKPIILSMARMDRIKNLSGLAEWYGRSSRLRSLANLVIIGGHVDVQNSSDAEEREEIRRMHEIMDEYQLDGQMRWIGSQLDKTRVGELYRVVADRRGVFVQPALFEAFGLTVIEAMTSGLPVFATRHGGPLEIIEDGVSGFHIDPNDPEATAEKLADFFERARERPKYWEEISDAALQRVEERYTWERYAERLMTIARVYGFWRFVTSRERQVMERYLQMFRHLQWRPLAHAVPME

SEQ ID NO: 969 - protein, 793 aa, Artificial Sequence
  engineered sucrose synthase encoded in plasmid pA32682
MIEELRQQLLDHPNSWRAFLRHLVASGRDSWLHHDLQDACKTFREQPPEGYPEDIGPLADFVAHTQEAIFRDPWMYFAWRLRPGVWEYVRIHVEQLAVEELSTDEYLQFKEQLVNGGAEGEAVLTVDFEDFRPGFQRLKDESTIGNGLTHLNRHLAGRIWTDLGAGRSKILEFLGLHRLDGQQLMLSDGNTDFDSLRQAVQYLGTLPPDTPWAEFEEDMQRMGFEPGWGDTAGRVRETMRLLMDLLDSPSPAALEEFLARIPMISNVLIVSIHGWFAQDNVLGRPDTGGQVVYILDQARALEREMRERLRQQGVDVEPRILIATRLIPESDGTTCDQRLEPVHGAENVWILRVPFRYEDGRIHPHWISRFKVWPYLERYAEDLEREVLAELGGRPDLIIGNYSDGNLVATLLSEKLGVTQCNIAHALEKSKYLYSDLHWKDHEQQYHFACQFTADLIAMNAADIIITSTYQEIAGNDREVGQYESYQAYTLPGLYRVVNGIDVFDSKFNIVSPGADPSIYFSYSETEERFSSLHPEIEELLFGREPGPPIRGVLSDRDKPIILSMARMDRIKNLTGLAELYGRSPRLRELANLVIIGGHVDVQNSMDAEEREEIRRMHEIMDKYQLDGQMRWIGSQLDKTRVGELYRVVADRRGVFVQPALFEAFGLTVIEAMSSGLPVFATRHGGPLEIIEDGVSGFHIDPNDPDAAAEKLADFLEAARERPKYWEKISDAALQRVRERYTWERYAERLMTLARVYGFWRFVSKRERQVMRRYLQMFRHLQWRPLAHAVPME

SEQ ID NO: 970 - protein, 793 aa, Artificial Sequence
  engineered sucrose synthase encoded in plasmid pA32684
MIEELRQQLLDHPNSWRAFLRHLVASGRDSWLHTDLQRACKTFREQPPEGYPEDIGPLADFVAHTQEAIFRDPWMYFAWRLRPGVWEYVRIHVEQLAVEELSTDEYLQAKEQLVTGGAEGEAVLTVDFEDFRPGFQRLKDESTIGNGLTHLNRHLAGRIWTDLGAGRSQILEFLGLHRLDGQQLMLSDGNTDFDSLRQTVQYLGTLPPETPWAEFREDMRRMGFEPGWGDTAERVRETMRLLMDLLDSPSPAALESFLARIPMISNVLIVSIHGWFAQDNVLGRPDTGGQVVYILDQARALEREMRNRLRQQGVDVEPRILIATRLIPESDGTTCDQRLEPVHGAENVWILRVPFRYEDGRIHPHWISRFKVWPYLERYAEDLEREVLAELGGRPDLIIGNYSDGNLVATLLSEKLGVTQCNIAHALEKSKYLYSDLHWKDHEQQYHFACQFTADLIAMNAADIIITSTYQEIAGNDREVGQYESHQDYTLPGLYRVVNGIDVFDSKFNIVSPGADPSIYFSYSETEERFSSLHPEIEELLFGREPGPPIRGVLEDRDKPIILSMARMDRIKNLTGLAELYGRSSRLRELANLVIIGGHVDVQNSMDAEEREEIRRMHEIMDKYQLDGQMRWVGSQLDKTRVGELYRVVADRRGVFVQPALFEAFGLTVIEAMSSGLPVFATRHGGPLEIIEDGVSGFHIDPNDPDATAEKLADFLEAARERPKYWEEISDAALARVEERYTWERYAERLMTLARVYGFWRFVSSRERQVMRRYLQMFRHLQWRPLAHAVPME

SEQ ID NO: 971 - protein, 793 aa, Artificial Sequence
  engineered sucrose synthase encoded in plasmid pA32686
MIEELRQQLLDSPNSWRAFLRHLVASGRDIWLHHDLQRACKDFREQPPEGYPEDISWLADFVAHTQEAIVRDPWVVFAWRERPGVWEYVRIHVEQLVVEELSTDEYLQFKEQLVGGGAEGEAVLTVDFEDFRPGVQRLKDESTIGNGLTHLNRHLAGRIWTDLGKGRSKILEFLSLHRLDGQQLMLSNRNTDFDSLRQTLQYLGTLPRDTPWAEFREDMRRRGFEPGWGRTAGRVRETMRLLMDLLDSPSPAALESFLARIPMISNVLIVSIHGWFAQDNVLGRPDTGGQVVYILDQARALEREMRRRLRQQGVDVEPRILIATRLIPESDGTTCDQRLEPVSGTENVWILRVPFRYEDGRIHPHWISRFKVWPYLERYAEDLEREVLAELGGRPDLIIGNYSDGNLVATLLSEKLGVTQCNIAHALEKSKYLYSDLHWKDFEQQYHFACQFTADLIAMNAADIIITSTYQEIAGNDREVGQYESYQDYTLPGLYRVVNGIDVFDSKFNIVSPGADPSIYFSYSRTEERFTSLHPEIEELLFGREPGPDIRGVLEDRDKPIILSMARMDRIKNLSGLAEWYGRSSRLRELANLVIIGGHVDVQNSMDAEEREEIRRMHEIMDEYQLDGQMRWVGSQLDKTRVGELYRYVADHRGVFVQPALFEAFGLTVIEAMASGLPVFATRHGGPLEIIEHGVSGFHIDPNDPEATAEKLADFLERARERPKYWEKISDAALQRVRERYTWERYAERLMTIARCFGFWRFVSKRERQVTRRYLQMFRHLQWRPLAHAVPME

SEQ ID NO: 972 - protein, 793 aa, Artificial Sequence
  engineered sucrose synthase encoded in plasmid pA32688
MIEELRQQLTDSPNAWRAFLRHLVASGRDFWLHHDLQRACEDFREQPPEGYPEDISWLAEFVRHAQEAIVRDPWVVFAWRERPGVWEYVRIHVEQLVVEELSTDEYLQFKEQLVQGGAEGEAVLEVDFEDFRPGVQRLKDESTIGNGLEHLNRHLAGRMWQDLGKGRSKLLEFLSLHRLDGQQLMLSDRIQDFDSLRQTLQYLGTLPEDTPWSEFEEDMRRRGFEPGWGRTAGRVRETMRLLMDLLDSPSPSALEKFLARIPMISNVLIVSIHGWFAQDNVLGRPDTGGQVVYILDQARALEREMRRRLREQGVDVEPRILIATRLIPDADGTTCDQRLEPVSGTENVHILRVPFRYEDGRIHPHWISRFKVWPYLERFAEDLEREVLAELGGRPDLIIGNYSDGNLVATLLSEKLGVTQCNIAHALEKSKYLYSDLYWKDFEQQYHFACQFTADLIAMNAADIIITSTYQEIAGNDNEVGQYESYQDYTLPGLYRVVNGIDVFDSKFNIVSPGADPSIYFSYSRTEERFTSLHPEIEELLFGREPGPDIRGVLEDRDKPIILSMARMDRIKNLSGLAEWYGRSSRLRELANLVIIGGYVDVKKSMDREEREEIRRMHEIMDEYNLDGQMRWVGSQLDKTRVGELYRYVADHRGVFVQPALYEAFGLTVIEAMASGLPVFATRHGGPLEIIEHGVSGFHIDPNQPDQTAELLADFLERARERPKYWEKISQAALQRVRERYTWERYAERLMTIARCFGFWRFVSKRERQVTRRYLQMFRHLQWRPLAHAVPME

SEQ ID NO: 973 - protein, 793 aa, Artificial Sequence
  engineered sucrose synthase encoded in plasmid pA32690
MIEELRQQLLDHPNEWRAFLRHLVASGRDMWLHTDLWRACKDFREQPPEGYPEDIGWLADFVRHTQEAIFRDPWMVFAWRLRPGVWEYVRIHVEQLAVEELSTDEYLQFKEQLVDGGAEGEAVLTVDFEDFRPGFQRLKDESTIGNGLEHLNRHLAGRMWTDLGAGRSQILEFLGLHRLDGQQLMLSNRNTDFDSLRQTVQYLGTLPEETPWAEFREDMRRRGFEPGWGNTAGRVRETMRLLMDLLDSPSPAALESFLARIPMISNVLIVSIHGWFAQDNVLGRPDTGGQVVYILDQARALEREMRNRLRQQGVDVEPRILIATRLIPESDGTTCDQRLEPVHGTENVQILRVPFRYEDGNIHPHWISRFKVWPYLERYAEDLEREVKAELGGRPDLIIGNYSDGNLVATLLSEKLGVTQCNIAHALEKSKYLYSDLHWPDHEQQYHFACQFTADLIAMNAADIIITSTYQEIAGNDREVGQYESHQHYTLPGLYRVVNGIDVFDPKFNIVSPGADPRIYFSYSRTEERFSSLWPEIEELLFGREPGPPIRGVLEDRDKPIILSMARLDRIKNLTGLAEWYGRSSRLRELANLVIIGGHVDVQNSTDREEREEIRRMHEIMDEYQLDGQMRWVGSQLDKTRVGELYRYVADGRGVFVQPALFEAFGLTVIEAMSSGLPVFATRHGGPLEIIEDGVSGFHIDPNDPEATAEKLADFLEAARERPKYWEKISDAALARVEERYTWERYAERLMTLARVYGFWRFVSSRERQVTRRYLQMFRHLQWRPLAHAVPME

SEQ ID NO: 974 - protein, 793 aa, Artificial Sequence
  engineered sucrose synthase encoded in plasmid pA32692
MIEELRQQLLDHPNEWRAFLRHLVASGRDMWLHTDLWRACKTFREQPPEGYPEDIGWLADFVAHTQEAIFRDPWMVFAWRLRPGVWEYVRIHVEQLAVEELSTDEYLQFKEQLVDGGAEGEAVLTVDFEDFRPGFQRLKDESTIGNGLEHLNRHLAGRIWTDLGAGRSQILEFLRLHRLDGQQLMLSNGNTDFDSLRQTVQYLGTLPEETPWAEFREDMRRRGFEPGWGNTAGRVRETMRLLMDLLDSPSPAALESFLARIPMISNVLIVSIHGWFAQDNVLGRPDTGGQVVYILDQARALEREMRNRLRQQGVDVEPRILIATRLIPESDGTTCDQRLEPVHGTENVQILRVPFRYEDGRIHPHWISRFKVWPYLERYAEDLEREVKAELGSRPDLIIGNYSDGNLVATLLSEKLGVTQCNIAHALEKSKYLYSDLHWPDHEQQYHFACQFTADLIAMNAADIIVTSTYQEIAGNDREVGQYESHQDYTLPGLYRVVNGIDVFDPKFNIVSPGADPRIYFSYSRTEERFSSLWPEIEELLFGREPGPPIRGVLEDRQKPIILSMARMDRIKNLTGLAEWYGRSSRLRELANLVIIGGHVDVQNSTDAEEREEIRRMHEIMDHYQLDGQMRWVGSQLDKTRVGELYRVVADGRGVFVQPALFEAFGLTVIEAMSSGLPVFATRHGGPLEIIEDGVSGFHIDPNDPEATAEKLADFLEAARERPKYWEEISDAALARVSERYTWERYAERLMTLARVYGFWRFVSSRERQVMRRYLQMFRHLQWRPLAHAVPME

SEQ ID NO: 975 - protein, 793 aa, Artificial Sequence
  engineered sucrose synthase encoded in plasmid pA32696
MIEELRQQLLDHPDSWRAFLRHLVASQRDIWLHTDLQRACKTFREQPPEGYPEDIGWLADFVAHTQEAIFRDPWMYFAWRLRPGVWEYVRIHVEQLAVEELSTDEYLQFKEQLVDGGAEGEAVLTVDFEDFRPGFQRLKDESTIGNGLTHLNRHLAGRIWTDLGAGRSQILEFLGLHRLDGQNLMLSNRNTDFDSLRQAVQYLGTLPDETPWAEFREDMRRRGFEPGWGNTAGRVRETMRLLMDLLDSPSPAALESFLARIPMISNVLIVSIHGWFAQDNVLGRPDTGGQVVYILDQARALEREMRNRLRQQGVDVEPRILIATRLIPESDGTTCDQRLEPVHGTENVQILRVPFRYEDGRIHPHWISRFKVWPYLERFAEDLEREVKAELGSRPDLIIGNYSDGNLVATLLSEKLGVTQCNIAHALEKSKYLYSDLHWPDHEQDYHFACQFTADLIAMNAADIIVTSTYQEIAGNDREVGQYESHQDYTLPGLYRVVNGIDVFDSKFNIVSPGADPRIYFSYSRTEERFSSLHPEIESLLFGREPGPDHRGVLEDRDKPIILSMARMDRIKNLSGLAEWYGRSSRLRSLANLVIIGGHVDVQNSSDAEEREEIRRMHEIMDEYQLDGQMRWVGSQLDKTVVGELYRVVADGRGVFVQPALFEAFGLTVIEAMSSGLPVFATRHGGPLEIIEDGVSGFHIDPNDPEATAEKLADFLEAARERPKYWEEISDAALARVSERYTWERYAERLMTIARVYGFWRFVLSRERQVTERYLQMFRHLQWRPLAHAVPME

SEQ ID NO: 976 - protein, 793 aa, Artificial Sequence
  engineered sucrose synthase encoded in plasmid pA32697
MIEELRQQLLQHRDAWRAFLRHLVAQGRDIWLHHDLQDACKDFREQPPEGYPEDISWLAEFVAHTQEAIFRDPWMYFAWRLRPGVWEYVRIHVEQLTVEELSTSEYLQFKEQLVDGNAEGNAVLTVDFEDFRPGFQRLKDESTIGNGLQHLNRHLAGRMWQDLGKGREKLLEFLGLHRLDGQQLMLSDRNQDFDSLRRAVQYLGTLPDDTPWSEFREDMQRLGFEPGWGDTAGRVRETMRLLMDLLDSPSPSALEKFLARIPMISNVLIVSIHGWFAQDNVLGRPDTGGQVVYILDQARALEREMRERLRQQGVDVEPRILIATRLIPDADGTTCDQRLEPVSGTENVQILRVPFRYEDGRIHPHWISRFKVWPYLERFAEDLEREVLAELGGRPDLIIGNYSDGNLVATLLSEKLGVTQCNIAHALEKSKYLYSDLYWKDHEQQYHFACQFTADLIAMNAADIIITSTYQEIAGNDREVGQYESHQDYTLPGLYRVVNGIDVFDSKFNIVSPGADPRIYFSYSDTEERLSSLHPEIEKLLFGREPGPDHRGVLEDRDKPIILSMARMDRIKNLTGLAEWYGRSSRLRELANLVIIGGHVDVQKSSDREEQEEIRRMHEIMDEYNLDGQMRWVGSQLDKTRVGELYRYVADRRGVFVQPALYEAFGLTVIEAMASGLPVFATRHGGPLEIIEDGVSGFHIDPNQPDQTAEKLADFLEAARERPSYWEKISQAALKRVRERYTWERYAERLMTLARVYGFWRFVSSRERQVTRRYLQMFRHLQWRPLAHAVPME

SEQ ID NO: 977 - protein, 793 aa, Artificial Sequence
  engineered sucrose synthase encoded in plasmid pA32698
MIEELRQQLSDHPREWRAFLRHLVASQRPSWLHHDLQRACKDFREQPPEGYPEDIGWLADFVAHTQEAIFRDPWMVFAWRERPGVWYYVRIHVEQLAVEELSVDEYLQFKEQLVGLGAEGEAVLKVDFEDFRPGSQRLKDESTIGDGLTHLNRHLAGRIWTDLGAGRSQILEFLSLHRLDGQQLMLSNRNTDFDSLRQTLQYLGTLPRETPWAEFREDMRRRGFEPGWGDTAGRVRETMRLLMDLLDSPSPAALESFLARIPMISNVLIVSIHGWFAQDNVLGRPDTGGQVVYILDQARALEREMRERLRQQGVDVEPRILIATRLIPESDGTTCDQRLEPVHGTENVWILRVPFRYEDGRIHPHWISRFKVWPYLERYAEDLEREVKAELGGRPDLIIGNYSDGNLVATLLSEKLGVTQCNIAHALEKSKYLYSDLHWKDHEQQYHFACQFTADLIAMNAADIIVTSTYQEIAGNDREVGQYESHQDFTLPGLYRVVNGIDVFDPKFNIVSPGADPRIYFSYSRTEERFSSLHPEIEELLFGREPGPDIRGVLEDRDKPIILSMARMDRIKNLSGLAEWYGRSSRLRELANLVIIGGHVDVQNSTDSEEREEIRRMHEIMDEYQLDGQMRWVGSQLDKTRVGELYRVVADGRGVFVQPALFEAFGLTVIEAMSSGLPVFATRHGGPLEIIEHGVSGFHIDPNDPEATAEKLADFLEAARERPKYWEEISDAALARVEERYTWERYAERLMTIARCFGFWRFVLSRESQVMRRYLQMFRHLQWRPLAHAVPME

SEQ ID NO: 978 - protein, 793 aa, Artificial Sequence
  engineered sucrose synthase encoded in plasmid pA32700
MIEELRQQLSDHPREWRAFLRHLVASQRPSWLHHDLQRACKDFREQPPEGYPEDIGWLADFVKHTQEAIFRDPWMVFAWRERPGVWYYVRIHVEQLAVEELSVSEYLQFKEELVGLSSEGEAVLEVDFEDFRPGSQRLKDESTIGNGLTHLNRHLAGRIWTDLGKGRSKILEFLSLHRLDGQQLMLSNRNTDFDSLRQTLQYLGTLPPETPWAEFREDMRRRGFEPGWGDTAGRVRETMRLLMDLLDSPSPAALEKFLARIPMISNVLIVSIHGWFAQDNVLGRPDTGGQVVYILDQARALEREMRERLRQQGVDVEPRILIATRLIPEADGTTCDQRLEPVHGTENVWILRVPFRYEDGRIHPHWISRFKVWPYLERYAEDLEREVLAELGGRPDLIIGNYSDGNLVATLLSEKLGVTQCNIAHALEKSKYLYSDLHWKDFEQQYHFACQFTADLIAMNAADIIITSTYQEIAGNDREVGQYESHQDFTLPGLYRVVNGIDVFDPKFNIVSPGADPRIYFSYSRTEERFSSLHPEIEELLFGREPGPDIRGVLEDRDKPIILSMARMDRIKNLTGLAEWYGRSSRLRELANLVIIGGHVDVQNSTDSEEREEIRRMHEIMDEYQLDGQMRWVGSQLDKTRVGELYRYVADGRGVFVQPALFEAFGLTVIEAMASGLPVFATRHGGPLEIIEHGVSGFHIDPNDPEATAEKLADFLEAARERPKYWEKISDAALQRVRERYTWERYAERLMTIARCFGFWRFVSSRERQVTRRYLQMFRHLQWRPLAHAVPME

SEQ ID NO: 979 - protein, 793 aa, Artificial Sequence
  engineered sucrose synthase encoded in plasmid pA32701
MIEELRQQLSDHPREWRAFLRHLVASQRPSWLHHDLQRACKDFREQPPEGYPEDIGALADFVKHTQEAIFRDPWMVFAWRERPGVWYYVRIHIEQLTVEELSVSEYLQFKEELVGLESEGEAVLEVDFEDFRRGSQRLKDESTIGNGLQHLNRHLAGRIWQDLGKGRSKILEFLSLHRLDGQQLMLSDRNQDFDSLRQALQYLGTLPPDTPWSEFREDMRRLGFEPGWGDTAERVRETMRLLMDLLDSPSPAALEKFLARIPMISNVLIVSIHGWFAQDNVLGRPDTGGQVVYILDQARALEREMRRRLREQGVDVEPRILIATRLIPEADGTTCDQRLEPVSGTENVWILRVPFRYEDGRIHPHWISRFKVWPYLERFAEDLEREVLAELGGRPDLIIGNYSDGNLVATLLSEKLGVTQCNIAHALEKSKYLYSDLYWRDFEQQYHFACQFTADLIAMNAADIIITSTYQEIAGNDREVGQYESHQDFTLPGLYRVVNGIDVFDPKFNIVSPGADPRIYFSYSRTEERFSSLHPEIEELLFGREPGPDIRGRLEDRDKPIILSMARMDRIKNLTGLAEWYGRSSRLRELANLVIIGGHVDVQNSTDSEEREEIRRMHEIMDEYNLDGQMRWVGSQLDKTRVGELYRYVADTRGVFVQPALFEAFGLTVIEAMASGLPVFATRHGGPLEIIEHGVSGFHIDPNDPEQTAELLADFLEAARERPKYWEKISQAALQRVRERYTWERYAERLMTIARCFGFWRFVSKRERQVTRRYLQMFRHLQWRPLAHAVPME

SEQ ID NO: 980 - protein, 793 aa, Artificial Sequence
  engineered sucrose synthase encoded in plasmid pA32702
MIEELRQQLLDHRNEWRAFLRHLVASGRDSWLHHDLQRACKDFREQPPEGYPEDIGWLADFVRHTQEAIFRDPWMYFAWRLRPGVWEYVRIHVEQLAVEELSVDEYLQFKEQLVGLGAEGEAVLTVDFEDFRPGFQRLKDESTIGNGLTHLNRHLAGRLWTDLGKGRSKILEFLGLHRLDGQQLMLSDRITDFDSLRQVLQYLGTLPPDTPWAEFREDMRRMGFEPGWGRTAERVRETMRLLMDLLDSPSPAALEKFLARIPMISNVLIVSIHGWFAQDNVLGRPDTGGQVVYILDQARALEREMRRRLRQQGVDVEPRILIATRLIPESDGTTCDQRLEPVHGTENVHILRVPFRYEDGRIHPHWISRFKVWPYLERFAEDLEREVLAELGGRPDLIIGNYSDGNLVATLLSEKLGVTQCNIAHALEKSKYLYSDLHWKDHEDQYHFACQFTADLIAMNAADIIVTSTYQEIAGNDREVGQYESHQDYTLPGLYRVVNGIDVFDPKFNIVSPGADPRIYFSYSRTEERFSSLHPEIEKLLFSREPGPDHRGVLEDRDKPIILSMARLDRIKNLTGLAEWYGRSSRLRELANLVIIGGHVDVDNSSDREEREEIERMHEIMDEYQLDGQMRWVGSQLDKTRVGELYRYVADTRGVFVQPALFEAFGLTVIEAMASGLPVFATRHGGPLEIIEDGVSGFHIDPNDPDATAEKLADFLEAARERPKYWEKISDAALQRVEERYTWERYAERLMTIARVFGFWRFVLKRERQVTERYLQMFRHLQWRPLAHAVPME

SEQ ID NO: 981 - protein, 793 aa, Artificial Sequence
  engineered sucrose synthase encoded in plasmid pA32704
MIEELRQQLLDHRNEWRAFLRHLVASGRDSWLHTDLQRACKTFREQPPEGYPEDIGWLADFVRHTQEAIFRDPWMYFAWRLRPGVWEYVRIHVEQLAVEELSTDEYLQFKEQLVGLGAEGEAVLTVDFEDFRPGFQRLKDESTIGDGLTHLNRHLAGRLWTDLGAGRSQILEFLGLHRLDGQQLMLSDRNTDFDSLRQVLQYLGTLPPDTPWAEFREDMRRMGFEPGWGDTAERVRETMRLLMDLLDSPSPAALESFLARIPMISNVLIVSIHGWFAQDNVLGRPDTGGQVVYILDQARALEREMRERLRQQGVDVEPRILIATRLIPESDGTTCDQRLEPVHGTENVHILRVPFRYEDGRIHPHWISRFKVWPYLERYAEDLEREVLAELGGRPDLIIGNYSDGNLVATLLSEKLGVTQCNIAHALEKSKYLYSDLHWKDHEQQYHFACQFTADLIAMNAADIIVTSTYQEIAGNDREVGQYESHQDYTLPGLYRVVNGIDVFDPKFNIVSPGADPRIYFSYSRTEERFSSLHPEIERLLFSREPGPDHRGVLEDRDKPIILSMARLDRIKNLTGLAEWYGRSSRLRELANLVIIGGHVDVQNSTDAEEREEIERMHEIMDEYQLDGQMRWVGSQLDKTVVGELYRYVADTRGVFVQPALFEAFGLTVIEAMSSGLPVFATRHGGPLEIIEDGVSGFHIDPNDPDATAEKLADFLEAARERPKYWEEISDAALARVEERYTWERYAERLMTIARVFGFWRFVLSRESQVMERYLQMFRHLQWRPLAHAVPME

SEQ ID NO: 982 - protein, 793 aa, Artificial Sequence
  engineered sucrose synthase encoded in plasmid pA32706
MIEELRQQLLDHPRSWRAFLRHLVASGRPLWLHHDLQRACKTFREQPPEGYPEDIGALADFVAHTQEAIFRDPWMVFAWRLRPGVWEYVRIHVEQLAVEELSTDEYLQFKEQLVGGGAEGEAVLTVDFEDFRPGFQRLKDESTIGNGLEHLNRHLAGRMWTDLGAGRSQILEFLGLHRLDGQQLMLSNRNTDFDSLRQAVQYLGTLPPETPWAEFREDMRRMGFEPGWGNTAGRVRETMRLLMDLLDSPSPAALESFLARIPMISNVLIVSIHGWFAQDNVLGRPDTGGQVVYILDQARALEREMRERLRQQGVDVEPRILIATRLIPESDGTTCDQRLEPVHGAENVQILRVPFRYEDGRIHPHWISRFKVWPYLERYAEDLEREVKAELGGRPDLIIGNYSDGNLVATLLSEKLGVTQCNIAHALEKSKYLYSDLYWKDHEQQYHFACQFTADLIAMNAADIIVTSTYQEIAGNDREVGQYESHQDYTLPGLYRVVNGIDVFDPKFNIVSPGADPRIYFSYSRTEERFSSLHPEIEELLFGREPGPPIRGVLEDRDKPIILSMARMDRIKNLTGLAEWYGRSPRLRELANLVIIGGHVDVQNSTDAEEREEIRRMHEIMDEYQLDGQMRWVGSQLDKTVVGELYRYVADTRGVFVQPALFEAFGLTVIEAMSSGLPVFATRHGGPLEIIEDGVSGFHIDPNDPEAVAEKLADFLEAARENPKYWEEISDAALARVSERYTWERYAERLMTIARVYGFWRFVLKRERQVTRRYLQMFRHLQWRPLAHAVPME

SEQ ID NO: 983 - protein, 793 aa, Artificial Sequence
  engineered sucrose synthase encoded in plasmid pA32708
MIEELRQQLQDHPNSWRAFLRHLVASGRGLWLHHDLQRACKTFREQPPEGYPEGISALADFVEHTQEAIFRDPWMVFALRLRPGVWEYVRIHVEQLAVEELSTDEYLQFKEQLVGGGSEGNAVLTVDFEDFRPGFQRLKDESTIGNGLQHLNRHLAGRMWTDLGKGRSQILEFLGLHRLDGQQLMLSDRITDFDSLRQAVQYLGTLPPETPWSEFEEDMRRMGFEPGWGRTAERVRETMRLLMDLLDSPSPAALEKFLARIPMISNVLIVSIHGWFAQDNVLGRPDTGGQVVYILDQARALEREMRERLRQQGVDVEPRILIATRLIPEADGTTCDQRLEPVSGAEHVHILRVPFRYEDGRIHPHWISRFKVWPYLERFAEDLEREVLAELGGRPDLIIGNYSDGNLVATLLSEKLGVTQCNIAHALEKSKYLYSDLYWKDFEDQYHFSCQFTADLIAMNAADIIITSTYQEIAGNDREVGQYESHQDYTLPGLYRVVNGIDVFDPKFNIVSPGADPRIYFSYSRTERRFSSLHPEIEELLFGREPGPPIRGVLEDRDKPIILSMARMDRIKNLTGLAEWYGRSPRLRELANLVIIGGHVDVQNSTDSEEREEIRRMHEIMDEYQLDGQMRWVGSQLDKTRVGELYRYVADRRGVFVQPALYEAFGLTVIEAMASGLPVFATRHGGPLEIIEDGVSGFHIDPNDPEAVAEKLADFLEAARNNPKYWEEISDAALQRVEERYTWERYAERLMTLARVYGFWRFVLKRERQVTRRYLQMFRHLQWRPLAHAVPME

SEQ ID NO: 984 - protein, 793 aa, Artificial Sequence
  engineered sucrose synthase encoded in plasmid pA32712
MIEELRQQLLDHPNTWRAFLRHLLASQRTIWLHHDLQRACKDFREQPPEGYPEDIGWLADFVEHTQEAIVRDPWVYFAWRERPGVWEYVRIHIEQLAVEELSVSEYLQFKEQLVDGGAEGEAVLTVDFEDFRPGFQRLKDESTIGDGLTHLNRHLAGRMWTDLGAGRSKILEFLGLHRLDGQQLMLSNRNTDFDSLRQTLQYLGTLPEETPWAEFREDMRRMGFEPGWGRTAGRVRETMRLLMDLLDSPSPAALETFLARIPMISNVLIVSIHGWFAQDNVLGRPDTGGQVVYILDQARALEREMRRRLRQQGVDVEPRILIATRLIPESDGTTCDQRLEPVHGTENVHILRVPFRYEDGRIHPHWISRFRVWPYLERYAEDLEREVLAELGGRPDLIIGNYSDGNLVATLLSEKLGVTQCNIAHALEKSKYLYSDLHWKDHEQQYHFACQFTADLIAMNAADIIITSTYQEIAGNDHEVGQYESHQSYTMPGLYRVVNGIDVFDPKFNIVSPGADPRIYFSYSRTEERFTSLWPEIEELLFGREPGPDHRGVLEDRDKPIILSMARMDRIKNLTGLAEWYGRSSRLRELANLVIIGGHVDVQNSSDAEEREEIRRMHEIMDEYQLDGQMRWVGSQLDKVRVGELYRYVADTRGVFVQPALFEAFGLTVIEAMSSGLPVFATRHGGPLEIIEDGVSGFHIDPNDPDAVAEKLADFLEAARERPKYWEEISDAALARVEERYTWERYAERLMTIARVFGFWKFVSSRERQVMERYLQMFRHLQWRPLAHAVPME

SEQ ID NO: 985 - protein, 793 aa, Artificial Sequence
  engineered sucrose synthase encoded in plasmid pA32715
MIEELRQQLLDHPNSWRAFLRHLVASGRDLWLHHDLQRACKTFREQPPEGYPEDIGWLADFVAHTQEAIFRDPWMVFAWRLRPGVWEYVRIHVEQLAVEELSTDEYLQAKEQLVGGGAEGEAVLTVDFEDFRPVSQRLKDESTIGDGLTHLNRHLAGRMWTDLGAGRSQILEFLSLHRLDGQQLMLSNGNTDFDSLRQTLQYLGTLPEETPWAEFREDMRRRGFEPGWGNTAGRVRETMRLLMDLLDSPSPAALESFLARIPMISNVLIVSIHGWFAQDNVLGYPDTGGQVVYILDQARALEREMRNRLRQQGVDVEPRILIATRLIPESDGTTCDQRLEPVHGTENVQILRVPFRYEDGRIHPHWISRFKVWPYLERYAEDLEREVLAELGSRPDLIIGNYSDGNLVATLLSEKLGVTQCNIAHALEKSKYLYSDLHWKDHEQDYHFACQFTADLIAMNAADIIVTSTYQEIAGNDREVGQYESHQDYTLPGLYRVVNGIDVFDPKFNIVSPGADPRIYFSYSRTEERFSSLWPEIESLLFGREPGPDIRGVLEDRQKPIILSMARMDRIKNLTGLAEWYGRSSRLRELANLVIIGGHVDVANSRDAEEREEIRRMHEIMDHYQLDGQMRWVGSQLDKTVVGELYRYVADGRGVFVQPALFEAFGLTVIEAMSSGLPVFATRHGGPLEIIEDGVSGFHIDPNDPEATAEKLADFLEAARERPKYWEEISDAALARVSERYTWERYAERLMTLARVYGFWRFVLSRERQVTERYLQMFRHLQWRPLAHAVPME

SEQ ID NO: 986 - protein, 793 aa, Artificial Sequence
  engineered sucrose synthase encoded in plasmid pA32716
MIEELRQQLLDHPDSWRAFLRHLVASGRDLWLHHDLQRACKTFREQPPEGYPEDIGWLADFVAHTQEAIFRDPWMVFAWRLRPGVWEYVRIHVEQLAVEELSTDEYLQAKEQLVGGGAEGEAVLTVDFEDFRPGFQRLKDESTIGNGLTHLNRHLAGRMWTDLGAGRSQILEFLSLHRLDGQQLMLSDGNTDFDSLRQTLQYLGTLPEETPWAEFREDMRRRGFEPGWGDTAGRVRETMRLLMDLLDSPSPAALESFLARIPMISNVLIVSIHGWFAQDNVLGYPDTGGQVVYILDQARALEREMRNRLRQQGVDVEPRILIATRLIPDSDGTTCDQRLEPVHGTENVQILRVPFRYEDGRIHPHWISRFKVWPYLERYAEDLEREVLAELGGRPDLIIGNYSDGNLVATLLSEKLGVTQCNIAHALEKSKYLYSDLHWKDHEQQYHFACQFTADLIAMNAADIIITSTYQEIAGNDREVGQYESHQDYTLPGLYRVVNGIDVFDPKFNIVSPGADPRIYFSYSRTEKRFSSLWPEIEELLFGREPGPDIRGVLEDRDKPIILSMARMDRIKNLTGLAEWYGRSSRLRELANLVIIGGHVDVANSRDAEEREEIRRMHEIMDEYQLDGQMRWVGSQLDKTRVGELYRYVADTRGVFVQPALFEAFGLTVIEAMSSGLPVFATRHGGPLEIIEDGVSGFHIDPNDPEATAEKLADFLEAARERPKYWEEISDAALARVEERYTWERYAERLMTLARVYGFWRFVSSRERQVTERYLQMFRHLQWRPLAHAVPME

SEQ ID NO: 987 - protein, 793 aa, Artificial Sequence
  engineered sucrose synthase encoded in plasmid pA32717
MIEELRQQLLDHPDSWRAFLRHLVASGRDLWLHHDLQRACKTFREQPPEGYPEDIGALADFVKHTQEAIFRDPWMVFAWRLRPGVWEYVRIHVEQLAVEELSTDEYLQFKEQLVGGGAEGEAVLTVDFEDFRRGFQRLKDESTIGNGLEHLNRHLAGRMWTDLGRGRSQILEFLSLHRLDGQQLMLSDGNTDFDSLRQALQYLGTLPPETPWAEFREDMRRRGFEPGWGDTAGRVRETMRLLMDLLDSPSPAALEKFLARIPMISNVLIVSIHGWFAQDNVLGYPDTGGQVVYILDQARALEREMRRRLRQQGVDVEPRILIATRLIPDSDGTTCDQRLEPVHGTENVWILRVPFRYEDGRIHPHWISRFKVWPYLERFAEDLEREVLAELGGRPDLIIGNYSDGNLVATLLSEKLGVTQCNIAHALEKSKYLYSDLYWKDHEDQYHFACQFTADLIAMNAADIIITSTYQEIAGNDREVGQYESHQDYTLPGLYRVVNGIDVFDPKFNIVSPGADPRIYFSYSRTERRFSSLHPEIEELLFGREPGPDIRGVLEDRDKPIILSMARMDRIKNLTGLAEWYGRSPRLRELANLVIIGGHVDVANSTDSEEREEIRRMHEIMDEYQLDGQMRWVGSQLDKTRVGELYRYVADRRGVFVQPALFEAFGLTVIEAMASGLPVFATRHGGPLEIIEDGVSGFHIDPNDPEATAEKLADFLERARERPKYWEEISDAALQRVRERYTWERYAERLMTLARVYGFWRFVSSRERQVTERYLQMFRHLQWRPLAHAVPME

SEQ ID NO: 988 - protein, 793 aa, Artificial Sequence
  engineered sucrose synthase encoded in plasmid pA32719
MIEVLRQQLLDSPRSWRAFLRHLVASQRDSWLHTDLQHACKTFREQPPEGYPEDIGWLADFIAHCQEAIFRDPWMVFAWRLRPGVWEYVRIHVEQLAVEELSTDEYLQAKEQLVGLGAEGEAVLTVDFEDFRPVSQRLKDESTIGDGLTHLNRHLAGRIWTDLAAGRSAILEFLGLHRLDNQNLMLSNGNTDFDSLRQTVQYLGTLPRETPWAEFREDMRRRGFEPGWGNTAGRVRETMRLLMDLLDSPSPAALESFLDRIPMISNVLIVSIHGWFAQDKVLGRPDTGGQVVYILDQARALEREMRNRLRQQGVDVEPRILIATRLIPESDGTTCDQRLEPVHGAENVQILRVPFRYEDGRIHPHWISRFKVWPYLERYARDLEREVKAELGSRPDLIIGNYSDGGLVATILSEKLGVTQCNIAHALEKSKYPGSDLHWPLYEQDHHFACQFTADLIAMNAADIIVTSTYQEIAGNDREVGQYESHQDYTLPGLYRVENGIDVFDSKFNIVSPGADPSTYFSYARHEERFSSLWPEIESLLFGREPGPDIRGVLEDPQKPIIFSVARMDRIKNLSGLAELYGRSARLRSLANLVIIGGHVDVQASMDAEEREEIRRMHEIMDRYQLDGQMRWVGSHLDKRVVGELYRVVADGRGVFVQPALFEAFGLTVIEAMSSGLPVFATRHGGPLEIIEDGVSGFHIDPNDPEAVAEKLADFLEAARERPKYWEEISQAALARVSERYTWERYAERLMTLARIYGFWRFVLSRESQVMERYLQMFRHLQWRPLAHAVPME

SEQ ID NO: 989 - protein, 793 aa, Artificial Sequence
  engineered sucrose synthase encoded in plasmid pA32721
MIEVLRQQLLDSPRSWRAFLRHLVASQRDSWLHTDLQHACKTFREQPPEGYPEDIGWLADFIAHCQEAIFRDPWMVFAWRLRPGVWEYVRIHVEQLAVEELSTDEYLQAKEQLVGLGAEGEAVLTVDFEDFRPVSQRLKDESTIGDGLTHLNRHLAGRIWTDLAAGRSAILEFLGLHRLDNQNLMLSNGNTDFDSLRQTVQYLGTLPRETPWAEFREDLRRRGFEPGWGNTAGRVRETMRLLMDLLDSPSPAALESFLDRIPMISNILIVSIHGWFAQDKVLGRPDTGGQVVYILDQARALEREMRNRLRQQGVDVEPRILIATRLIPESDGTTCDQRLEPVHGAENVQILRVPFRYEDGRIHPHWISRFKIWPYLERYARDLEREVKAELGSRPDLIIGNYSDGGLVATILSEKLGVTQCNIAHALEKSKYPGSDLHWPLYEQDHHFACQFTADLIAMNAADIIVTSTYQEIAGNDREVGQYESYQDYTLPGLYRVENGIDVFDSKFNIVSPGADPSTYFSYARHEERFSSLWPEIESLLFGREPGPDIRGVLEDPQKPIIFSVARMDRIKNLSGLAELYGRSARLRSLANLVIIGGHVDVQASMDAEEREEIRRMHEIMDRYQLDGQMRWVGSHLDKRVVGELYRVVADGRGVFVQPALFEAFGLTVIEAMSSGLPVFATRHGGPLEIIEDGVSGFHIDPNDPEAVAEKLADFLEAARERPKYWEEISQAALARVSERYTWERYAERLMTLARIFGFWRFVLSRESQVMERYLQMFRHLQWRPLAHAVPME

SEQ ID NO: 990 - protein, 793 aa, Artificial Sequence
  engineered sucrose synthase encoded in plasmid pA32723
MIEVLRQQLLDSPRSWRAFLRHLVASQRDSWLHTDLQHACKTFREQPPEGYPEDIGWLADFIAHCQEAIFRDPWIVFAWRLRPGVWEYVRIHVEQLAVEELSTDEYLQAKEQLVGLGAEGEAVLTVDFEDFRPVSQRLKDESTIGDGLTHLNRHLAGRIWTDLAAGRSAILEFLGLHRLDNQNLMLSNGNTDFDSLRQTVQYLGTLPRETPWAEFREDLRRRGFEPGWGNTAGRVRETMRLLMDLLDSPSPAALESFLDRIPMISNILIVSIHGWFAQDKVLGRPDTGGQVVYILDQVRALEREMRNRLRQQGVDVEPRILIATRLIPESDGTTCDQRLEPVHGAENVQILRVPFRYEDGRIHPHWISRFKVWPYLERYARDAEREVKAELGSRPDLIIGNYSDGGLVATILSEKLGVTQCNIAHALEKSKYPGSDLHWPLYEQDHHFACQFTADLIAMNAADIIVTSTYQEIAGNDREVGQYESYQDFTLPGLYRVENGIDVFDSKFNIVSPGADPSTYFSYARHEERFSSLWPEIESLLFGREPGPDIRGVLEDPQKPIIFSVARMDRIKNLSGLAELFGRSARLRSLANLVIIGGHVDVQASMDAEEREEIRRMHEIMDRYQLDGQMRWIGSHLDKRVVGELYRVVADGRGVFVQPALFEAFGLTVIEAMSSGLPVFATRHGGPLEIIEDGVSGFHIDPNDPEAVAEKLADFLEAARERPKYWEEISQAALARVSERYTWERYAERLMTLARIYGFWRFVLSRESQVMERYLQMFRHLQWRPLAHAVPME

SEQ ID NO: 991 - protein, 793 aa, Artificial Sequence
  engineered sucrose synthase encoded in plasmid pA32731
MIEVLRQQLLDSPRSWRAFLRHLVASQRDSWLHTDLQHACKTFREQPPEGYPEDIGWLADFIAHCQEAIFRDPWAYFAWRLRPGVWEYVRIHVEQLAVEELSTDEFLQAKEQLVGLGAEGEAVLTVDFEDFRPVSQRLKDESTIGDGLTHLNRHLAGRIWTDLAAGRSAILEFLGLHRLDNQNLMLSNGNTDFDSLRQTVQYLGTLPRETPWAEFREDMRRRGFEPGWGNTAGRVRETMRLLMDLLDSPSPAALESFLDRIPMISNVLIVSPHGWFAQDKVLGRPDTGGQVVYILDQVRALEREMRNRLRQQGVDVEPRILILTRLIPESDGTTCDQRLEPVHGAENVQILRVPFRYEDGRIHPHWISRFKIWPYLERYARDLEREVKAELGSRPDLIIGNYSDGNLVATILSEKLGVTQCNIAHALEKSKYPGSDLHWPLYEQDHHFACQFTADLIAMNAADIIVTSTYQEIAGNDREVGQYESYQDYTLPGLYRVENGIDVFDSKFNIVSPGADPSTYFSYARHEERFSSLWPEIESLLFGREPGPDIRGVLEDPQKPIIFSVARMDRIKNLSGLAELYGRSARLRSLANLVIIGGHVDVQASMDAEEREEIRRMHEIMDRYQLDGQMRWVGSHLDKRVVGELYRVVADGRGVFVQPALFEAFGLTVIEAMSSGLPVFATRHGGPLEIIEDGVSGFHIDPNDPEAVAEKLADFLEAARERPKYWEEISQAALARVSERYTWERYAERLMTLARIYGFWRFVLSRESQVMERYLQMFRHLQWRPLAHAVPME

SEQ ID NO: 992 - protein, 793 aa, Artificial Sequence
  engineered sucrose synthase encoded in plasmid pA32732
MIEVLRQQLLDSPRSWRAFLRHLVASQRDSWLHTDLQHACKTFREQPPEGYPEDIGWLADFIAHCQEAIFRDPWICFAWRLRPGVWEYLRIHVEQLAVEELSTDEYLQAKEQLVGLGAEGEAVLTVDFEDFRPVSQRLKDESTIGDGLTHLNRHLAGRIWTDLAAGRSAILEFLGLHRLDNQNLMLSNGNTDFDSLRQTVQYLGTLPRETPWAEFREDMRRRGFEPGWGNTAGRVRETMRLLMDLLDSPSPAALESFLDRIPMISNILILSPHGWFGQDKVLGRPDTGGQVVYILDQARALEREMRNRLRQQGVDVEPRILIATRLIPESDGTTCDQRLEPVHGAENVQILRVPFRYEDGRIHPHWISRFKVWPYLERYARDLEREVKAELGSRPDLIIGNYSDGNLVATILSEKLGVTQCNIAHALEKSKYPGSDLHWPLYEQDHHFACQFTADLIAMNAADFIITSTYQEIAGNDREVGQYESHQDYTLPGLYRVENGIDVFDSKFNIVSPGADPSTYFSYARHEERFSSLWPEIESLLFGREPGPDIRGVLEDPQKPILFSVARLDRIKNLSGLAELYGRSARLRSLANLVIIGGHVDVQASMDAEEREEIRRMHEIMDRYQLDGQMRWVGSHLDKRVVGELYRVVADGRGVFVQPALFEAFGLTVIEAMSSGLPVFATRHGGPLEIIEDGVSGFHIDPNDPEAVAEKLADFLEAARERPKYWEEISQAALARVSERYTWERYAERLMTLARIYGFWRFVLSRESQVMERYLQMFRHLQWRPLAHAVPME

SEQ ID NO: 993 - protein, 793 aa, Artificial Sequence
  engineered sucrose synthase encoded in plasmid pA32734
MIEVLRQQLLDSPRSWRAFLRHLVASQRDSWLHTDLQHACKTFREQPPEGYPEDIGWLADFIAHCQEAVFRDPWIVFAWRLRPGVWEYVRIHVEQLAVEELSTDEYLQAKEQLVGLGAEGEAVLTVDFEDFRPVSQRLKDESTIGDGLTHLNRHLAGRIWTDLAAGRSAILEFLGLHRLDNQNLMLSNGNTDFDSLRQTVQYLGTLPRETPWAEFREDMRRRGFEPGWGNTAGRVRETMRLLMDLLDSPSPAALESFLDRIPMISNVLILSPHGWFAQDKVLGRPDTGGQVVYILDQVRALEREMRNRLRQQGVDVEPRILVVTRLIPESDGTTCDQRLEPVHGAENVQILRVPFRYEDGRIHPHWISRFKIWPYLERYARDAEREVKAELGSRPDLIIGNYSDGNLVATILSEKLGVTQCNIAHALEKSKYPGSDLHWPLYEQDHHFACQFTADLIAMNAADFIVTSTYQEIAGNDREVGQYESHQDYTLPGLYRVENGIDVFDSKFNIVSPGADPSTYFSYARHEERFSSLWPEIESLLFGREPGPDIRGVLEDPQKPILFSVARLDRIKNLSGLAELFGRSARLRSLANLVIIGGHVDVQASMDAEEREEIRRMHEIMDRYQLDGQMRWLGSHLDKRVVGELYRVVADGRGVFVQPALFEAFGLTVIEAMSSGLPVFATRHGGPLEIIEDGVSGFHIDPNDPEAVAEKLADFLEAARERPKYWEEISQAALARVSERYTWERYAERLMTLARIYGFWRFVLSRESQVMERYLQMFRHLQWRPLAHAVPME

SEQ ID NO: 994 - protein, 793 aa, Artificial Sequence
  engineered sucrose synthase encoded in plasmid pA32736
MIEVLRQQLLDSPRSWRAFLRHLVASQRDSWLHTDLQHACKTFREQPPEGYPEDIGWLADFIAHCQEAIFRDPWMVFAWRLRPGVWEYVRIHVEQLAVEELSTDEYLQAKEQLVGLGAEGEAVLTVDFEDFRPVSQRLKDESTIGDGLTHLNRHLAGRIWTDLAAGRSAILEFLGLHRLDNQNLMLSNGNTDFDSLRQTVQYLGTLPRETPWAEFREDLRRRGFEPGWGNTAGRVRETMRLLMDLLDSPSPAALESFLDRIPMISNVLIVSPHGWFAQDKVLGRPDTGGQVVYILDQVRALEREMRNRLRQQGVDVEPRILIVTRLIPESDGTTCDQRLEPVHGAENVQILRVPFRYEDGRIHPHWISRFKVWPYLERYARDAERELKAELGSRPDLIIGNYSDGNLVATILSEKLGVTQCNIAHALEKSKYPGSDLHWPLYEQDHHFACQFTADLIAMNAADFIITSTYQEIAGNDREVGQYESHQDYTLPGLYRVENGIDVFDSKFNIVSPGADPSTYFSYARHEERFSSLWPEIESLLFGREPGPDIRGVLEDPQKPIIFSVARMDRIKNLSGLAELYGRSARLRSLANLVIIGGHVDVQASMDAEEREEIRRMHEIMDRYQLDGQMRWVGSHLDKRVVGELYRVVADGRGVFVQPALFEAFGLTVIEAMSSGLPVFATRHGGPLEIIEDGVSGFHIDPNDPEAVAEKLADFLEAARERPKYWEEISQAALARVSERYTWERYAERLMTLARIFGFWRFVLSRESQVMERYLQMFRHLQWRPLAHAVPME

SEQ ID NO: 995 - protein, 793 aa, Artificial Sequence
  engineered sucrose synthase encoded in plasmid pA32737
MRERVEDTLSAHRNELVSLLSRYVAQGKGILQPHQLLDELEAVIEEDEEKEKLKDGPFGEVLRSTQEAIVLPPWVALAVRPRPGVWEYVRVNVDELSVEQLTVSEYLRFKEELVDGSSEGNAVLEVDFEDFNASFQRPKDESTIGNGVQHLNRHLSGRMWRDLESGMEPLLDFLRAHKYKGHTMMLNDRIQSFDRLRKAEQYLGKLPPDTPYSEFEHKLQELGLERGWGDTAERVLEMIRLLMDILDSPSPSTLEKFLGRIPMVFNVVILSPHGYFGQANVLGLPDTGGQVVYILDQVRALENEMLLRIKQQGLDITPRILIVTRLIPDAKGTTCNQRLEKVSGTEHSHILRVPFRTEKGILRPKWISRFDVWPYLERFAEDVANEIAAELQGKPDLIIGNYSDGNLVASLLAHKLGVTQCTIAHALEKTKYPDSDIYWKKFEEKYHFSCQFTADLIAMNHADFIITSTYQEIAGSDDTVGQYESHTAFTLPGLYRVVHGIDVFDPKFNIVSPGADMSIYFPYTEKEKRLTSLHPEIEELLYSPEQNDEHIGVLKDRSKPIIFSVARLDRVKNITGLVEWYGKNARLRELVNLVVVAGYIDVKKSKDREEIAEIEKMHELIKKYNLNGQFRWISAHMNKVRVGELYRYIADTKGAFVQPAFYEAFGLTVVEAMTCGLPTFATCHGGPAEIIEHGVSGFHIDPYHGDQAAELLADFFEKCKEDPSHWDKISEGGLQRIYEKYTWKIYSERLMTLAGVYGFWKYVSKRERQVTRRYLQMFRHLQFRPLAHSVPLE

SEQ ID NO: 996 - protein, 793 aa, Artificial Sequence
  engineered sucrose synthase encoded in plasmid pA32739
MRERVEDTLSAHRNELVSLLSRYVAQGKGILQPHQLLDELEAIIEEDREKEKLKDGPFGEVLRSTQEAIVLPPWVALAVRPRPGVWEYVRVNVHELSVEQLTVSEYLQFKEELVDGSAEGNAVLEVDFEDFNASFQRPKDESTIGNGVQHLNRHLSGRLWRDLESGLQPLLDFLRAHKYKGHTMMLNDRIQSFDRLRKAEQYLGTLPPDTPYSEFEHKLQELGLEKGWGDTAERVLEMIRLLMDLLDSPSPSTLEKFLGRIPMVFNVVILSPHGYFAQANVLGLPDTGGQVVYILDQVRALENEMLLRIKQQGLDITPRILIVTRLLPDAKGTTCNQRLEKVSGTEHSYILRVPFRTEKGIVRPKWISRFDVWPYLERFAEDVANEIAAELQGKPDLIIGNYSDGNLVASLLAHKLGVTQCTIAHALEKTKYPDSDIYWKKFDEKYHFSCQFTADLIAMNHADFIITSTYQEIAGSDDTVGQYESHTAFTLPGLYRVVHGIDVFDPKFNIVSPGADMSIYFPYTEKERRLTSLHPEIEELLYSPEQNDEHIGVLKDRSKPIIFSVARLDRVKNITGLVEWYGKNAKLRELVNLVVVAGDRDVKKSKDREEIAEIEKMHELIEKYNLNGQFRWISAHMNKVRVGELYRYIADTRGAFVQPALYEAFGLTVVEAMTCGLPTFATCHGGPAEIIVHGVSGFHIDPYHPDQAAELLVDFFEKCKEDPSHWDKISEGGLQRIYEKYTWKIYSERLMTLAGVYGFWKYVSKRERQVTRRYLQMFRHLQYRPLAHSVPLE

SEQ ID NO: 997 - protein, 793 aa, Artificial Sequence
  engineered sucrose synthase encoded in plasmid pA32748
MIEALREFLSEHRDAVYLLLRRYLGLGRPFLLRSDLWDEFERFCEEQGEEEELLDSPLARAIRRAQEAALDAPWVYLAVRPRVARWRYLRIHLETLDVEEISVSEFLAFKERLVNGDAEGEAVLEVDFGDFNREFQKLKDESTIGRGVEHLNRHLSGRLWQDLGKGDQRLLEFLRVHQYRGQQLMLNGRIRDFDGLRRALQYLGGQPDEAPWEEVGHALQELGFEPGWGRTVARIRDTMRLLMDILDSPSPGNLERFLGRIPMIFSLAILSPHGYFGQANVLGRPDTGGQVVYILDQVRALEREMRQRLYEQGLDIEPQILVVTRLIPEAGGTTCDQRLEPIVGTRNARILRVPFRNEDGEVIPHWISRFEVWPYLERFALDVERELLAELGGRPDLIIGNYSDGNLVATLLSQKLGVTQCNIAHALEKTKYLYSDLYWRDNEAQYHFSCQFTADLIAMNAADFIITSTYQEIAGTDDSVGQYESYAAFTMPGLYRVVNGIDVFDPKFNIVSPGADADVYFPYTEQERRLTGLHPEIEELIYGGPPRPDARGVLADPDKPLLFTVARLDRIKNITGLVEWYGASERLRELANLVVIAGHVDPARSGDREERAQIERMHELMDRYGLDGQVRWLGLHLDKNLVGELYRYVADRRGAFVQPALFEAFGLTVIEAMSSGLPTFATRYGGPLEIIEDGVSGFHIDPNHGEAAAELMADFFERCAADPGYWERISQGALERVRARYTWELYAERMMTLSRIYGFWKYVTNRERQVTRRYLQMFRHLQFRPLAHAVPLE

SEQ ID NO: 998 - protein, 793 aa, Artificial Sequence
  engineered sucrose synthase encoded in plasmid pA32750
MIETLEQFLSEHRDAVYLLLRRYLALGRPFLLRSDLWDEFAAFCEEEGEGAELRDSPLARLISRTQEAAVDAPWIYLAVRPRVARWEYLRIHVETLEVEELSVSEFLAFKERLVGGDAEGDAVLEVDLGDFNREFQKLKDESTIGRGVEHLNRHLSGRLWQDLGGGDQRLLDFLRVHQYRGQQLMLNDRIRDFDELRRALQYLGGQPPEAPWEEVAHELQRLGFEPGWGRTVARMRDTLRLLMDILDSPSPANLERFLGRIPMIFSIAILSPHGYFGQSNVLGLPDTGGQVVYILDQVRALEREMRRRLAEQGLDIEPQILVVTRLIPEAGGTTCDQRLEPIVGTRNARILRVPFRNEDGEVLPHWISRFEVWPYLERFALDVERELLAELGGRPDLIIGNYSDGNLVATLLAQKLGVTQCNIAHALEKTKYLYSDLYWRDNEEQYHFSCQFTADLIAMNAADFIITSTYQEIAGRDDSVGQYESYSAFTMPGLYRVVNGIDVFDPKFNIVSPGADAEVYFPYTETERRLTGLHPEIEELIFGGPPRPDARGVLADPDKPLLFTVARLDRIKNITGLVEWYGRSPRLRELANLLVVAGHVDPAQSDDREEREQIERMHELMDEYGLDGQVRWLGLHLDKNLVGELYRYVADRRGAFVQPALFEAFGLTVIEAMASGLPTFATCYGGPLEIIEDGVSGFHIDPNHGEEAAERIADFFERCAADPGYWERLSQGALARVRSRYTWELYAERMMTLSRIYGFWKYVTNRERQVTRRYLQMFRHLQFRPLAHAVPLE

SEQ ID NO: 999 - protein, 793 aa, Artificial Sequence
  engineered sucrose synthase encoded in plasmid pA32754
MIEELEEFLSEHRDSVYLLLRHYLGLGRPFLLRSDLWDEFERFCEEHGEGQGLLDSPLARAIASAQEAAVDAPWIYLAVRPRVARWEYLRIHVETLEVEEISVSEFLAFKERLVGGDPEGEAVLEVDLGDFNREFQKLKDESTIGRGVEHLNRHLSGRLWQDLGKGDQRLLDFLRVHQYRGQQLMLNDRIRDFDALRRALQYLGGQPPEATWEEVGHRLQELGFEPGWGRTVARMRDTLRLLMDILDSPSPETLERFLGRIPMIFSIAILSPHGYFGQANVLGLPDTGGQVVYILDQVRALEKEMRRRLHEQGLDIEPQILVVTRLIPEAGGTTCDQRLEPIVGTRNARILRVPFRNEDGEVIPHWISRFEVWPYLERFALDVERELLAELGGRPDLIIGNYSDGNLVATLLAQKLGVTQCNIAHALEKTKYLYSDLYWKENEEQYHFSCQFTADLIAMNAADFIITSTYQEIAGTDDSVGQYESYSAFTMPGLYRVVNGIDVFDPKFNIVSPGADAEVYFPYTETERRLTGLHPEIEELVFGGEDRPDARGVLADPDKPLLFTVARLDRIKNITGLVEWYGRSERLREQANLLVVAGHVDAALSDDREEREQIARMHELMDEYGLDGQVRWLGVHLDKNLVGELYRYVADRRGAFVQPALFEAFGLTVIEAMSSGLPTFATCYGGPLEIIEDGVSGFHIDPNHGEEAAEIIADFFERCAKEPGYWERISQGALERVRSRYTWELYAERMMTLSRIYGFWKYVTNRERQVTRRYLQMFRHLQFRPLAHAVPLE

SEQ ID NO: 1000 - protein, 793 aa, Artificial Sequence
  engineered sucrose synthase encoded in plasmid pA32758
MIESLREFLAEHRDAVYLLLRRYLALGRPFLLRSDLWDEFEAFCEEDGEESALKDSPLARLIAATQEAALDAPWIYLAVRPRVARWEYLRIHLEDLEVEEITVSEYLAFKERLVNGDPEGEAVLEVDLGDFNREFQKLKDESTIGRGVEHLNRHLSGRLWQDLGKGDQRLLEFLRVHQYRGQQLMLNDRIKDFDGLRRAEQYLGTQPPDAPWEEVAHALQELGFEPGWGRTAERMRDTLRLLMDILDSPSPETLERFLGRIPMIFNIAILSPHGYFGQANVLGLPDTGGQVVYILDQVRALEREMRRRLAEQGLDIEPQILVVTRLIPEAGGTTCDQRLEPIVGTRNARILRVPFRNEDGEVVPQWISRFEVWPYLERFALDVERELLAELGGRPDLIIGNYSDGNLVATLLAQKLGVTQCNIAHALEKTKYLYSDLYWRDNEEQYHFSCQFTADLIAMNAADFIITSTYQEIAGTDDSVGQYESYSAFTMPGLYRVVNGIDVFDPKFNIVSPGADAEVYFPYTETERRLTGLHPEIEELLFGGEQRPDARGVLEDRDKPLLFTVARLDRIKNITGLVEWYGRSPRLRELANLLVVAGHVDPEKSDDREERAQIERMHELMDEYGLDGQVRWLGVHLDKNLVGELYRYVADRRGAFVQPALFEAFGLTVIEAMSSGLPTFATCYGGPLEIIEDGVSGFHIDPNHGEEAAERIADFFERCAADPGYWERISQGALERVRSRYTWKLYAERLMTLSRIYGFWKYVTNRERQVTRRYLQMFRHLQYRPLAHAVPLE

SEQ ID NO: 1001 - protein, 793 aa, Artificial Sequence
  engineered sucrose synthase encoded in plasmid pA32767
MIESLEQFLSEHRDAVYLLLRRYLGLGRPFLLRSDLWDEFDRFCEEREEEEGLADSPLARLIAAAQEAAIDAPWIYLAVRPRVARWEYLRIHLETLSVEEVSVSEFLAFKERLVNGDPEGPAVLEVDLGDFNREFQKLKDESTIGRGVEHLNRHLSGRLWQDLGKGDQRLLEFLRVHQYRGQQLMLNDRIRDFDGLRRALQYLGTQPPEAPWEEVGHELQELGFEPGWGRTVARIRDTLRLLMDILDSPSPATLERFLGRIPMIFSIAILSPHGYFGQSNVLGLPDTGGQVVYILDQVRALEREMRRRLAEQGLDIEPQILVVTRLIPEAGGTTCDQRLEPIVGTENARILRVPFRNEDGEVVPQWISRFEIWPYLERFALDAERELLAELGGRPDLIIGNYSDGNLVATLLSQKLGVTQCNIAHALEKTKYLYSDLYWRDNEAQYHFSCQFTADLIAMNAADFIITSTYQEIAGNDDSVGQYESYSAFTMPGLYRVVNGIDVFDPKFNIVSPGADAEIYFPYTETERRLTGLHPEIEELIFGGEDRPDARGVLADPDKPLLFTVARLDRIKNITGLVEWYGRSERLRELANLLVIAGHVDPAQSDDDEEREQIARMHELMDEYGLDGQVRWLGVHLDKNLVGELYRYVADRRGAFVQPALFEAFGLTVIEAMSSGLPTFATRYGGPLEIIEDGVSGFHIDPNHGEEAAELMADFFERCAADPGYWERISQGGLERVRSRYTWELYAERMMTLSRIYGFWKYVTNRERQVTRRYLQMFRHLQFRPLAHAVPLE

SEQ ID NO: 1002 - protein, 793 aa, Artificial Sequence
  engineered sucrose synthase encoded in plasmid pA32770
MIEELRQFLQEHRDALYLLLRRYLALGRPFLLRSDLWDEFAAFCEEDGEEEGLADSPLARAIAKAQEAALDAPWIYLAVRPRVARWEYLRIHLETLDVEEVSVSEFLAFKERLVGGDAEGEAVLEVDLGDFNREFQKLKDESTIGRGVEHLNRHLSGRLWQDLGKGDQRLLDFLRVHQYRGQQLMLNDRIRDFDALRRALQYLGRQPPEAPWEEVAHRLQRLGFEPGWGRTAARIRDTMRLLMDILDSPSPAALERFLGRIPMIFSIAILSPHGYFGQANVLGRPDTGGQVVYILDQVRALEREMRRRLAEQGLDIEPQILVVTRLIPEAGGTTCDQRLEPIVGTENARILRVPFRNESGEVVPHWISRFEVWPYLERFALDVEKELLAELGGRPDLIIGNYSDGNLVATLLAQKLGVTQCNIAHALEKTKYLYSDLYWRDNEEQYHFSCQFTADLIAMNAADFIITSTYQEIAGTDDSVGQYESYSAFTMPGLYRVVNGIDVFDPKFNIVSPGADAEVYFPYTDTERRLTGLHPEIEELVYGGEPRGDARGVLADRDKPLLFTVARLDRIKNITGLVEWYGRSPRLRELANLLVIAGHVDPARSADREEREQIQRMHELMDRHGLDGQVRWLGVHLDKNLVGELYRYVADRRGAFVQPALFEAFGLTVIEAMASGLPTFATRYGGPLEIIEDGVSGFHIDPNHGEAAAERMADFFERCAADPGYWERISQAALERVEARYTWKLYAERMMTLSRIYGFWKYVTNRERQVTRRYLQMFRHLQFRPLAHAVPLE

SEQ ID NO: 1003 - protein, 793 aa, Artificial Sequence
  engineered sucrose synthase encoded in plasmid pA32779
MIEELREFLSDHRDAVYLLLRRYLALGRPFLLRSDLWDEFEAFCEEQGEEEGLCDSPLARLIRRAQEAVVEAPWLYLAVRPRVARWRYLRFHVETLEVEEISVSEFLAFKERLVNGDAEGPAVLEVDLGDFNREFQKLKDESTIGRGVEHLNRHLSGRLWQDLGKGDQRLLEFLRVHQYRGQQLMLNDRIRDFDALRRALQYLGKQPPDAPWEEVAHELQELGFEPGWGRTAARMRETLRLLMDILDSPSPGTLERFLGRIPMIFSIAILSPHGYFGQDNVLGRPDTGGQVVYILDQVRALEREMRRRLAEQGLDIEPQILVVTRLIPEAGGTTCDQRLEPIVGTRNARILRVPFRNEDGEVVPHWISRFEVWPYLERFALDVERELLAELGGRPDLIIGNYSDGNLVATLLAQKLGVTQCNIAHALEKTKYLYSDLYWRDNEEQYHFSCQFTADLIAMNAADFIITSTYQEIAGTDDSVGQYESYQAFTLPGLYRVVNGIDVFDPKFNIVSPGADPEVYFPYTETERRLTGLHPEIEELVFGGEPRPDARGVLADPDKPLLFTVARLDRIKNITGLVEWYGRSERLRELANLLVIAGHVDPAQSDDAEEREQIARMHELMDRHGLDGQVRWLGVHLDKNLVGELYRYVADRRGAFVQPALFEAFGLTVIEAMSSGLPTFATCYGGPLEIIEDGVSGFHIDPNHGEQAAELIADFFERCAAEPGYWERISQGALERVEARYTWELYAERMMTLSRIYGFWKYVTNRERQVTRRYLQMFRHLQFRPLAHAVPLE

SEQ ID NO: 1004 - protein, 793 aa, Artificial Sequence
  engineered sucrose synthase encoded in plasmid pA32781
MIEELREFLAEHRDALYLLLRRYVGLGRPFLLRSDLWDEFERFCEEDGEEAGLADSPLARAISATQEAAVDAPWIYLAVRPRVARWEYLRIHLETLEVEEISVSEFLAFKERLVNGDAEGDAVLEVDLGDFNREFQKLKDESTIGRGVEHLNRHLSGRLWQDLGKGDQRLLDFLRVHQYRGQQLMLNDRIRDFDALRRALQYLGRQPDEAPWEDVAHRLQRLGFEPGWGRTAARVRDTLRLLMDILDSPSPRTLERFLGRIPMIFSIAILSPHGYFGQANVLGLPDTGGQVVYILDQVRALEREMRQRLAEQGLDIEPQILVVTRLIPEAGGTTCDQRLEPISGTENARILRVPFRNEDGEVVPHWISRFEIWPYLERFALEVERELLAELGGRPDLIIGNYSDGNLVATLLSQKLGVTQCNIAHALEKTKYLYSDLYWKDNEEQYHFSCQFTADLIAMNAADFIITSTYQEIAGTDDSVGQYESYSAFTMPGLYRVVNGIDVFDPKFNIVSPGADADVYFPYTETERRLTGLHPEIEELIFGGPERPDARGVLADRDKPLLFTVARLDRIKNITGLVEWYGRSPRLRELANLLVIAGHVDPEQSGDDEEREQIERMHELMDRYGLDGQVRWLGLHLDKNLVGELYRYVADRRGAFVQPALFEAFGLTVIEAMASGLPTFATCYGGPLEIIEDGVSGFHIDPNHGDEAAERIADFFERCAAEPGYWERISQGALERVRSRYTWELYAERMMTLSRIYGFWKYVTNRERQVTRRYLQMFRHLQFRPLAHAVPLE

SEQ ID NO: 1005 - protein, 793 aa, Artificial Sequence
  engineered sucrose synthase encoded in plasmid pA32787
MIESLRDFLAEHRDAVYLLLRRYLGLGRPFLLRSDLWDEFLAFCEEQGEEEGLADSPLARLISAAQEAVLDAPWIYFAVRPRVARWRYLRFHVETMDVEEISVSEFLAFKERLVGGDAEGDAVLEVDLGDFNREFQKLKDESTIGRGVEHLNRHLSGRLWQDLGKGDQRLLEFLRVHQYRGRQLMLNDRITDFDELRRALQYLGRQPPEATWAEVGHRLQELGFEPGWGRTVARMRDTLRLLMDILDSPSPETLERFLGRIPMIFSIAILSPHGYFGQANVLGLPDTGGQVVYILDQVRALEREMRRRLAEQGLDIEPQILVVTRLIPEAGGTTCDQRLEPIVGTENARILRVPFRNEDGEVVPHWISRFEIWPYLERFALDVERELLAELGGRPDLIIGNYSDGNLVATLLSQKLGVTQCNIAHALEKTKYLYSDLYWRDNEEQYHFSCQFTADLIAMNAADFIITSTYQEIAGTDDSVGQYESYSAFTMPGLYRVVNGIDVFDPKFNIVSPGADAEVYFPYTETERRLTGLHPEIEELVFGGEPRPDARGVLADPDKPLLFTVARLDRIKNITGLVEWYGRNERLRELANLLVIAGHVDPARSGDREEREQIRRMHELMDEHGLDGQVRWLGVHLDKNLVGELYRFVADRRGAFVQPALFEAFGLTVIEAMSSGLPTFATCYGGPLEIIEHGVSGFHIDPNHGEEAAERIADFFERCAAEPGYWERISEGALERVRARYTWELYAERMMTLSRIYGFWKYVTNRERQVTRRYLQMFRHLQFRPLAHAVPLE

SEQ ID NO: 1006 - protein, 793 aa, Artificial Sequence
  engineered sucrose synthase encoded in plasmid pA32790
MIEELEEFLSEHRDSVYLLLRHYLGLGRPFLLRSDLWDEFERFCEEHGEGQGLLDSPLARAIASAQEAAVDAPWIYLAVRPRVARWEYLRIHVETLEVEEISVSEFLAFKERLVGGDPEGEAVLEVDLGDFNREFQKLKDESTIGRGVEHLNRHLSGRLWQDLGKGDQRLLDFLRVHQYRGQQLMLNDRIRDFDALRRALQYLGGQPPEATWEEVGHRLQELGFEPGWGRTVARMRDTLRLLMDILDSPSPETLERFLGRIPMIFSIAILSPHGYFGQANVLGLPDTGGQVVYILDQVRALEKEMRRRLHEQGLDIEPQILVVTRLIPEAGGTTCDQRLEPIVGTRNARILRVPFRNEDGEVIPHWISRFEVWPYLERFALDVERELLAELGGRPDLIIGNYSDGNLVATLLAQKLGVTQCNIAHALEKTKYLYSDLYWKENEEQYHFSCQFTADLIAMNAADFIITSTYQEIAGTDDSVGQYESYSAFTMPGLYRVVNGIDVFDPKFNIVSPGADAEVYFPYTETERRLTGLHPEIEELVFGGEDRPDARGVLADPDKPLLFTVARLDRIKNITGLVEWYGRSERLREQANLLVVAGHVDAAKSDDREEREQIARMHELMDEYGLDGQVRWLGVHLDKNLVGELYRYVADRRGAFVQPALFEAFGLTVIEAMSSGLPTFATCYGGPLEIIEDGVSGFHIDPNHGEEAAEIIADFFERCAKEPGYWERISQGALERVRSRYTWELYAERMMTLSRIYGFWKYVTNRERQVTRRYLQMFRHLQFRPLAHAVPLE

SEQ ID NO: 1007 - protein, 793 aa, Artificial Sequence
  engineered sucrose synthase encoded in plasmid pA32793
MIESLREFLSQHRDALYLLLRRYLGLGRPFLLRSDLWDEFERFCEEDGEEEGLLDSPLARAISATQEAVLDAPWIYLAVRPRVARWEYLRFHLETLDVEEIPVSEFLAFKERLVNGDGEGEAVLEVDLGDFNREFQKLKDESTIGRGVEHLNRHLSGRLWQDLGKGDQRLLEFLRVHQYRGQQLMLNDRIKDFDALRRALQYLGRQPPEAPWAEVAHELQALGFEPGWGRTAARMRETLRLLMDILDSPSPENLERFLGRIPMIFSIAILSPHGYFGQSNVLGLPDTGGQVVYILDQVRALEREMRQRLAEQGLDIEPQILVVTRLIPEAGGTTCDQRLEPIVGTRNARILRVPFRNEDGEVIPHWISRFEVWPYLERFALDVERELLAELGGRPDLIIGNYSDGNLVATLLAQKLGVTQCNIAHALEKTKYLYSDLYWRDNEEQYHFSCQFTADLIAMNAADFIITSTYQEIAGTDDSVGQYESYAAFTMPGLYRVVNGIDVFDPKFNIVSPGADAEVYFPYTETERRLTGLHPEIEELIYGGEPRPDARGVLADRDKPLLFTVARLDRIKNITGLVEWYGRSERLRELANLLVVAGHVDPAQSSDREERAQIARMHELMDEYGLDGQVRWLGVHLDKNLVGELYRYIADRRGAFVQPALFEAFGLTVIEAMSSGLPTFATCYGGPLEIIEDGVSGFHIDPNHGEEAAELIADFFERCASDPGYWERISQAALERVEARYTWELYAERMMTLSRIYGFWKYVTNRERQVTRRYLQMFRHLQYRPLAHAVPLE

SEQ ID NO: 1008 - protein, 793 aa, Artificial Sequence
  engineered sucrose synthase encoded in plasmid pA32796
MIEVLRQQLLDSPRSWRAFLRHLVASQRDSWLHTDLQHACKTFREQPPEGYPEDIGWLADFIAHCQEAIFRDPWMVFAWRLRPGVWEYVRIHVEQLAVEELSTDEYLQAKEQLVGLGAEGEAVLTVDFEDFRPVSQRLKDESTIGDGLTHLNRHLAGRIWTDLAAGRSAILEFLGLHRLDNQNLMLSNGNTDFDSLRQTVQYLGTLPRETPWAEFREDMRRRGFEPGWGNTAGRVRETMRLLMDLLDSPSPAALESFLDRIPMISNVLIVSIHGWFAQDKVLGRPDTGGQVVYILDQARALEREMRNRLRQQGVDVEPRILIATRLIPESDGTTCDQRLEPVHGAENVQILRVPFRYEDGRIHPHWISRFKVWPYLERYARDLEREVKAELGSRPDLIIGNYSDGGLVATILSEKLGVTQCNIAHALEKSKYPGSDLHWPLYEQDHHFACQFTADLIAMNAADIIVTSTYQEIAGNDREVGQYESHQDYTLPGLYRVENGIDVFDSKFNIVSPGADPSTYFSYARHEERFSSLWPEIESLLFGREPGPDIRGVLEDPQKPIWLSVGRLDRIKNLSGLLELWGRSARLRSLANLVIIGGHADVQASMDAEEREELRRIHEILDRYQLDGQFRWVGSHLDKRVVGELYRVVADGRGWFIQPALFEAFGLTVIEAMSSGLPVWATRHGGPLEIIEDGVSGFHIDPNDPEAVVEKWADVIEAARERPKYWEEISQAALARVSERYTWERYAERLMTIARCFGFWRFVLSRESQVMERYLQMFRHLQWRPLAHAVPME

SEQ ID NO: 1009 - protein, 793 aa, Artificial Sequence
  engineered sucrose synthase encoded in plasmid pA32797
MIEVLRQQLLDSPRSWRAFLRHLVASQRDSWLHTDLQHACKTFREQPPEGYPEDIGWLADFIAHCQEAIFRDPWMVFAWRLRPGVWEYVRIHVEQLAVEELSTDEYLQAKEQLVGLGAEGEAVLTVDFEDFRPVSQRLKDESTIGDGLTHLNRHLAGRIWTDLAAGRSAILEFLGLHRLDNQNLMLSNGNTDFDSLRQTVQYLGTLPRETPWAEFREDMRRRGFEPGWGNTAGRVRETMRLLMDLLDSPSPAALESFLDRIPMISNVLIVSIHGWFAQDKVLGRPDTGGQVVYILDQARALEREMRNRLRQQGVDVEPRILIATRLIPESDGTTCDQRLEPVHGAENVQILRVPFRYEDGRIHPHWISRFKVWPYLERYARDLEREVKAELGSRPDLIIGNYSDGGLVATILSEKLGVTQCNIAHALEKSKYPGSDLHWPLYEQDHHFACQFTADLIAMNAADIIVTSTYQEIAGNDREVGQYESHQDYTLPGLYRVENGIDVFDSKFNIVSPGADPSTYFSYARHEERFSSLWPEIESLLFGREPGPDIRGVLEDPQKPIILSVGRLDRIKNLSGLLELWGRSARLRSLANLVIIGGHIDVQASMDAEEREEIRRLHEILDRYQLDGQVRIVGSHLDKRVVGELYRVVADGRGMFIQPALFEAFGLTVIEAMSSGLPVWATRHGGPLEIIEDGVSGFHIDPNDPEAVVEKWADWIEAARERPKYWEEISQAALARVSERYTWERYAERLMTIARCFGFWRFVLSRESQVMERYLQMFRHLQWRPLAHAVPME

SEQ ID NO: 1010 - protein, 793 aa, Artificial Sequence
  engineered sucrose synthase encoded in plasmid pA32799
MIEVLRQQLLDSPRSWRAFLRHLVASQRDSWLHTDLQHACKTFREQPPEGYPEDIGWLADFIAHCQEAIFRDPWMVFAWRLRPGVWEYVRIHVEQLAVEELSTDEYLQAKEQLVGLGAEGEAVLTVDFEDFRPVSQRLKDESTIGDGLTHLNRHLAGRIWTDLAAGRSAILEFLGLHRLDNQNLMLSNGNTDFDSLRQTVQYLGTLPRETPWAEFREDMRRRGFEPGWGNTAGRVRETMRLLMDLLDSPSPAALESFLDRIPMISNVLIVSIHGWFAQDKVLGRPDTGGQVVYILDQARALEREMRNRLRQQGVDVEPRILIATRLIPESDGTTCDQRLEPVHGAENVQILRVPFRYEDGRIHPHWISRFKVWPYLERYARDLEREVKAELGSRPDLIIGNYSDGGLVATILSEKLGVTQCNIAHALEKSKYPGSDLHWPLYEQDHHFACQFTADLIAMNAADIIVTSTYQEIAGNDREVGQYESHQDYTLPGLYRVENGIDVFDSKFNIVSPGADPSTYFSYARHEERFSSLWPEIESLLFGREPGPDIRGVLEDPQKPIILSVGRLDRIKNLSGLLELYGRSARLRSLANLVIIGGHVDVQASMDAEEREELRRLHEILDRYQLDGQVRLVGSHLDKRVVGELYRVVADGRGIFIQPALFEAFGLTVIEAMSSGLPVWATRHGGPLEIIEDGVSGFHIDPNDPEAVVEKWADWWEAARERPKYWEEISQAALARVSERYTWERYAERLMTIARCFGFWRFVLSRESQVMERYLQMFRHLQWRPLAHAVPME

SEQ ID NO: 1011 - protein, 793 aa, Artificial Sequence
  engineered sucrose synthase encoded in plasmid pA32800
MIEVLRQQLLDSPRSWRAFLRHLVASQRDSWLHTDLQHACKTFREQPPEGYPEDIGWLADFIAHCQEAIFRDPWMVFAWRLRPGVWEYVRIHVEQLAVEELSTDEYLQAKEQLVGLGAEGEAVLTVDFEDFRPVSQRLKDESTIGDGLTHLNRHLAGRIWTDLAAGRSAILEFLGLHRLDNQNLMLSNGNTDFDSLRQTVQYLGTLPRETPWAEFREDMRRRGFEPGWGNTAGRVRETMRLLMDLLDSPSPAALESFLDRIPMISNVLIVSIHGWFAQDKVLGRPDTGGQVVYILDQARALEREMRNRLRQQGVDVEPRILIATRLIPESDGTTCDQRLEPVHGAENVQILRVPFRYEDGRIHPHWISRFKVWPYLERYARDLEREVKAELGSRPDLIIGNYSDGGLVATILSEKLGVTQCNIAHALEKSKYPGSDLHWPLYEQDHHFACQFTADLIAMNAADIIVTSTYQEIAGNDREVGQYESHQDYTLPGLYRVENGIDVFDSKFNIVSPGADPSTYFSYARHEERFSSLWPEIESLLFGREPGPDIRGVLEDPQKPIILSVARTDRIKNLSGLLELYGRSARLRSLANLVVIGGHVDVQASMDAEEREENRRAHEIMDRYQLDGQTRLVGSHLDKRVVGELYRVVADGRGIFVQPALFEAFGLTVIEAMSSGLPVFATRHGGPLEIIEDGVSGFHIDPNDPEAVAEKIADFLEAARERPKYWEEISQAALARVSERYTWERYAERLMTIARCFGFWRFVLSRESQVMERYLQMFRHLQWRPLAHAVPME

SEQ ID NO: 1012 - protein, 793 aa, Artificial Sequence
  engineered sucrose synthase encoded in plasmid pA32801
MIEVLRQQLLDSPRSWRAFLRHLVASQRDSWLHTDLQHACKTFREQPPEGYPEDIGWLADFIAHCQEAIFRDPWMVFAWRLRPGVWEYVRIHVEQLAVEELSTDEYLQAKEQLVGLGAEGEAVLTVDFEDFRPVSQRLKDESTIGDGLTHLNRHLAGRIWTDLAAGRSAILEFLGLHRLDNQNLMLSNGNTDFDSLRQTVQYLGTLPRETPWAEFREDMRRRGFEPGWGNTAGRVRETMRLLMDLLDSPSPAALESFLDRIPMISNVLIVSIHGWFAQDKVLGRPDTGGQVVYILDQARALEREMRNRLRQQGVDVEPRILIATRLIPESDGTTCDQRLEPVHGAENVQILRVPFRYEDGRIHPHWISRFKVWPYLERYARDLEREVKAELGSRPDLIIGNYSDGGLVATILSEKLGVTQCNIAHALEKSKYPGSDLHWPLYEQDHHFACQFTADLIAMNAADIIVTSTYQEIAGNDREVGQYESHQDYTLPGLYRVENGIDVFDSKFNIVSPGADPSTYFSYARHEERFSSLWPEIESLLFGREPGPDIRGVLEDPQKPIILSVARTDRIKNLSGLLELYGRSARLRSLANLVVIGGHVDVQASMDAEEREEIRRAHEIMDRYQLDGQTRLVGSHLDKRVVGELYRVVADGRGIFVQPALFEAFGLTVIEAMSSGLPVFATRHGGPLEIIEDGVSGFHIDPNDPEAVAEKIADFLEAARERPKYWEEISQAALARVSERYTWERYAERLMTIARCFGFWRFVLSRESQVMERYLQMFRHLQWRPLAHAVPME

SEQ ID NO: 1013 - protein, 793 aa, Artificial Sequence
  engineered sucrose synthase encoded in plasmid pA32802
MIEVLRQQLLDSPRSWRAFLRHLVASQRDSWLHTDLQHACKTFREQPPEGYPEDIGWLADFIAHCQEAIFRDPWMVFAWRLRPGVWEYVRIHVEQLAVEELSTDEYLQAKEQLVGLGAEGEAVLTVDFEDFRPVSQRLKDESTIGDGLTHLNRHLAGRIWTDLAAGRSAILEFLGLHRLDNQNLMLSNGNTDFDSLRQTVQYLGTLPRETPWAEFREDMRRRGFEPGWGNTAGRVRETMRLLMDLLDSPSPAALESFLDRIPMISNVLIVSIHGWFAQDKVLGRPDTGGQVVYILDQARALEREMRNRLRQQGVDVEPRILIATRLIPESDGTTCDQRLEPVHGAENVQILRVPFRYEDGRIHPHWISRFKVWPYLERYARDLEREVKAELGSRPDLIIGNYSDGGLVATILSEKLGVTQCNIAHALEKSKYPGSDLHWPLYEQDHHFACQFTADLIAMNAADIIVTSTYQEIAGNDREVGQYESHQDYTLPGLYRVENGIDVFDSKFNIVSPGADPSTYFSYARHEERFSSLWPEIESVVFGREPGPDIRGVLEDPQKPIILSIARMDRIKNLSGLAELYGRSARLRSLANLIIIGGHVDVQASMDAEEREEIRRMHEIMDRYQLDGQMRWIGSHLDKRWVGEWYRWIADGRGVWVQPALFEAFGLTVIEVMSSGLPVFATRHGGPLEIIEDGVSGFHIDPNDPEAVAEKLADFLEAARERPKYWEEISQAALARVSERYTWERYAERLMTIARCFGFWRFVLSRESQVMERYLQMFRHLQWRPLAHAVPME

SEQ ID NO: 1014 - protein, 793 aa, Artificial Sequence
  engineered sucrose synthase encoded in plasmid pA32804
MIEVLRQQLLDSPRSWRAFLRHLVASQRDSWLHTDLQHACKTFREQPPEGYPEDIGWLADFIAHCQEAIFRDPWMVFAWRLRPGVWEYVRIHVEQLAVEELSTDEYLQAKEQLVGLGAEGEAVLTVDFEDFRPVSQRLKDESTIGDGLTHLNRHLAGRIWTDLAAGRSAILEFLGLHRLDNQNLMLSNGNTDFDSLRQTVQYLGTLPRETPWAEFREDMRRRGFEPGWGNTAGRVRETMRLLMDLLDSPSPAALESFLDRIPMISNVLIVSIHGWFAQDKVLGRPDTGGQVVYILDQARALEREMRNRLRQQGVDVEPRILIATRLIPESDGTTCDQRLEPVHGAENVQILRVPFRYEDGRIHPHWISRFKVWPYLERYARDLEREVKAELGSRPDLIIGNYSDGGLVATILSEKLGVTQCNIAHALEKSKYPGSDLHWPLYEQDHHFACQFTADLIAMNAADIIVTSTYQEIAGNDREVGQYESHQDYTLPGLYRVENGIDVFDSKFNIVSPGADPSTYFSYARHEERFSSLWPEIESVIFGREPGPDIRGVLEDPQKPIILSIARMDRIKNLSGLAELYGRSARLRSLANLIIIGGHVDVQASMDAEEREEIRRMHEIMDRYQLDGQMRWIGSHLDKRWVGEWYRVIADGRGVWVQPALFEAFGLTVIEVMSSGLPVFATRHGGPLEIIEDGVSGFHIDPNDPEAVAEKLADFLEAARERPKYWEEISQAALARVSERYTWERYAERLMTIARCFGFWRFVLSRESQVMERYLQMFRHLQWRPLAHAVPME

SEQ ID NO: 1015 - protein, 793 aa, Artificial Sequence
  engineered sucrose synthase encoded in plasmid pA32806
MIEVLRQQLLDSPRSWRAFLRHLVASQRDSWLHTDLQHACKTFREQPPEGYPEDIGWLADFIAHCQEAIFRDPWMVFAWRLRPGVWEYVRIHVEQLAVEELSTDEYLQAKEQLVGLGAEGEAVLTVDFEDFRPVSQRLKDESTIGDGLTHLNRHLAGRLWTDLAAGRSAILEWLGLHRIDNQNYWLSNGNTDWDSIRQILQYLGTLPRETPWAEFREDWRRRGWEPGWGNTAGRIRETLRIWWDLMDSPSPAAWESWLDRLPLISNVLIVSIHGWFAQDKVLGRPDTGGQVVYILDQARALEREMRNRLRQQGIDVEPRILIATRLIPESDGTTCDQRLEPVHGAENVQILRVPFRYEDGRIHPHWISRFKVWPYLERYARDLEREVKAELGSRPDLIIGNYSDGGLVATILSEKLGVTQCNIAHALEKSKYPGSDLHWPLYEQDHHFACQFTADLIAMNAADIIVTSTYQEIAGNDREVGQYESHQDYTLPGLYRVENGIDVFDSKFNIVSPGADPSTYFSYARHEERFSSLWPEIESLLFGREPGPDIRGVLEDPQKPIILSVARMDRIKNLSGLAELYGRSARLRSLANLVIIGGHVDVQASMDAEEREEIRRMHEIMDRYQLDGQMRWVGSHLDKRVVGELYRVVADGRGVFVQPALFEAFGLTVIEAMSSGLPVFATRHGGPLEIIEDGVSGFHIDPNDPEAVAEKLADFLEAARERPKYWEEISQAALARVSERYTWERYAERLMTIARLFGFWRFLLSRESQVMERYLQMFRHLQWRPLAHAVPME

SEQ ID NO: 1016 - protein, 793 aa, Artificial Sequence
  engineered sucrose synthase encoded in plasmid pA32808
MIEVLRQQLLDSPRSWRAFLRHLVASQRDSWLHTDLQHACKTFREQPPEGYPEDIGWLADFIAHCQEAIFRDPWMVFAWRLRPGVWEYVRIHVEQLAVEELSTDEYLQAKEQLVGLGAEGEAVLTVDFEDFRPVSQRLKDESTIGDGLTHLNRHIAGRLWTDLAAGRSALLEWLGLHRIDNQNLWLSNGNTDLDSLRQILQYLGTLPRETPWAEFREDWRRRGWEPGWGNTAGRVRETLRIWWDLMDSPSPAALESWLDRLPLISNVLIVSIHGWFAQDKVLGRPDTGGQVVYILDQARALEREMRNRLRQQGIDIEPRILIATRLIPESDGTTCDQRLEPVHGAENVQILRVPFRYEDGRIHPHWISRFKVWPYLERYARDLEREVKAELGSRPDLIIGNYSDGGLVATILSEKLGVTQCNIAHALEKSKYPGSDLHWPLYEQDHHFACQFTADLIAMNAADIIVTSTYQEIAGNDREVGQYESHQDYTLPGLYRVENGIDVFDSKFNIVSPGADPSTYFSYARHEERFSSLWPEIESLLFGREPGPDIRGVLEDPQKPIILSVARMDRIKNLSGLAELYGRSARLRSLANLVIIGGHVDVQASMDAEEREEIRRMHEIMDRYQLDGQMRWVGSHLDKRVVGELYRVVADGRGVFVQPALFEAFGLTVIEAMSSGLPVFATRHGGPLEIIEDGVSGFHIDPNDPEAVAEKLADFLEAARERPKYWEEISQAALARVSERYTWERYAERLMTIARVFGFWRFILSRESQVMERYLQMFRHLQWRPLAHAVPME

SEQ ID NO: 1017 - protein, 793 aa, Artificial Sequence
  engineered sucrose synthase encoded in plasmid pA32816
MIEVLRQQLLDSPRSWRAFLRHLVASQRDSWLHTDLQHACKTFREQPPEGYPEDIGWLADFIAHCQEAIFRDPWMVFAWRLRPGVWEYVRIHVEQLAVEELSTDEYLQAKEQLVGLGAEGEAVLTVDFEDFRPVSQRLKDESTIGDGLTHLNRHLAGRIWTDLAAGRSAILEFLGLHRLDNQNLMLSNGNTDFDSLRQTVQYLGTLPRETPWAEFREDMRRRGFEPGWGNTAGRVRETMRLLMDLLDSPSPAALESFLDRIPMISNILIVSIHGWFAQDKVLGRPDTGGQVVWILDQARALEREIRNRLRQQGVDVEPRILIATRLIPESDGTTCDQRLEPVHGAENVQILRVPFRYEDGRIHPHWISRFKVWPYLERYARDLEREVKAELGSRPDIIIGNYSDGGLVATILSEKLGVTQLNFAHALEKSKYPGSDLHWPLYEQDHHFACQFTADLIAMNAADVIVTSTYQEIAGNDREVGQYESHQDYTLPGLYRVENGIDVFDSKFNIISPGADPSTYFSYARHEERFSSLWPEIESLLFGREPGPDIRGVLEDPQKPIILSVARMDRIKNLSGLAELYGRSARLRSLANLVIIGGHVDVQASMDAEEREEIRRMHEIMDRYQLDGQMRWVGSHLDKRVVGELYRVVADGRGVFVQPALFEAFGLTVIEAMSSGLPVFATRHGGPLEIIEDGVSGFHIDPNDPEAVAEKLADFLEAARERPKYWEEISQAALARVSERYTWERWAERLLTLWRCLGFWRFVLSRESQVMERYLQMFRHLQWRPLAHAVPME

SEQ ID NO: 1018 - protein, 793 aa, Artificial Sequence
  engineered sucrose synthase encoded in plasmid pA32819
MIEVLRQQLLDSPRSWRAFLRHLVASQRDSWLHTDLQHACKTFREQPPEGYPEDIGWLADFIAHCQEAIFRDPWMVFAWRLRPGVWEYVRIHVEQLAVEELSTDEYLQAKEQLVGLGAEGEAVLTVDFEDFRPVSQRLKDESTIGDGLTHLNRHLAGRIWTDLAAGRSAILEFLGLHRLDNQNLMLSNGNTDFDSLRQTVQYLGTLPRETPWAEFREDMRRRGFEPGWGNTAGRVRETMRLLMDLLDSPSPAALESFLDRIPMISNVIIISIHGWFAQDKVLGRPDTGGQVVYILDQARALEREMRNRLRQQGVDVEPRIIILTRLIPESDGTTCDQRLEPVHGAENVQILRIPFRYEDGRIHPHWISRFKVWPYLERWVRDVEREIKAELGSRPDLIIGNYSDGGLIATIMSEKWGVTQCNIAHALEKSKYPGSDLHWPLYEQDHHFACQFTADLIAMNAADIIVTSTYQEIAGNDREVGQYESHQDYTLPGLYRVENGIDVFDSKFNIVSPGADPSTYFSYARHEERFSSLWPEIESLLFGREPGPDIRGVLEDPQKPIILSVARMDRIKNLSGLAELYGRSARLRSLANLVIIGGHVDVQASMDAEEREEIRRMHEIMDRYQLDGQMRWVGSHLDKRVVGELYRVVADGRGVFVQPALFEAFGLTVIEAMSSGLPVFATRHGGPLEIIEDGVSGFHIDPNDPEAVAEKLADFLEAARERPKYWEEISQAALARVSERYTWERYAERLMTIARCFGFWRFVLSRESQVMERYLQMFRHLQWRPLAHAVPME

SEQ ID NO: 1019 - protein, 793 aa, Artificial Sequence
  engineered sucrose synthase encoded in plasmid pA32820
MIEVLRQQLLDSPRSWRAFLRHLVASQRDSWLHTDLQHACKTFREQPPEGYPEDIGWLADFIAHCQEAIFRDPWMVFAWRLRPGVWEYVRIHVEQLAVEELSTDEYLQAKEQLVGLGAEGEAVLTVDFEDFRPVSQRLKDESTIGDGLTHLNRHLAGRIWTDLAAGRSAILEFLGLHRLDNQNLMLSNGNTDFDSLRQTVQYLGTLPRETPWAEFREDMRRRGFEPGWGNTAGRVRETMRLLMDLLDSPSPAALESFLDRIPMISNVIIISVHGWFAQDKVLGRPDTGGQVVYILDQARALEREMRNRLRQQGVDVEPRILIITRLIPESDGTTCDQRLEPVHGAENVQILRIPFRYEDGRIHPHWISRFKVWPYLERWVRDVEREIKAELGSRPDLIIGNYSDGGLIATIMSEKWGVTQCNIAHALEKSKYPGSDLHWPLYEQDHHFACQFTADLIAMNAADIIVTSTYQEIAGNDREVGQYESHQDYTLPGLYRVENGIDVFDSKFNIVSPGADPSTYFSYARHEERFSSLWPEIESLLFGREPGPDIRGVLEDPQKPIILSVARMDRIKNLSGLAELYGRSARLRSLANLVIIGGHVDVQASMDAEEREEIRRMHEIMDRYQLDGQMRWVGSHLDKRVVGELYRVVADGRGVFVQPALFEAFGLTVIEAMSSGLPVFATRHGGPLEIIEDGVSGFHIDPNDPEAVAEKLADFLEAARERPKYWEEISQAALARVSERYTWERYAERLMTIARCFGFWRFVLSRESQVMERYLQMFRHLQWRPLAHAVPME

SEQ ID NO: 1020 - protein, 793 aa, Artificial Sequence
  engineered sucrose synthase encoded in plasmid pA32821
MIEVLRQQLLDSPRSWRAFLRHLVASQRDSWLHTDLQHACKTFREQPPEGYPEDIGWLADFIAHCQEAIFRDPWMVFAWRLRPGVWEYVRIHVEQLAVEELSTDEYLQAKEQLVGLGAEGEAVWTIDWEDLRPVSQRLKDESTIGDGLTHLNRHLAGRIWTDLAAGRSAILEFLGLHRLDNQNLMLSNGNTDFDSLRQTVQYLGTLPRETPWAEFREDMRRRGFEPGWGNTAGRVRETMRLLMDLLDSPSPAALESFLDRIPMISNVLIVSIHGWFAQDKVLGRPDTGGQVVYILDQARALEREMRNRLRQQGVDVEPRILIATRLIPESDGTTCDQRLEPVHGAENVQILRVPFRYEDGRIHPHWISRFKVWPYLERYARDLEREVKAELGSRPDLIIGNYSDGGLVATILSEKLGVTQCNIAHALEKSKYPGSDLHWPLYEQDHHFACQFTADLIAMNAADIIVTSTYQEIAGNDREVGQYESHQDYTLPGLYRIENGIDVFDSKFNIVSPGADPSTYFSYARHEERFSSLWPEIESLLFGREPGPDIRGVLEDPQKPIILSVARMDRIKNLSGLAELYGRSARLRSLANLVIIGGHVDVQASMDAEEREEIRRMHEIMDRYQLDGQMRWVGSHLDKRVVGELYRVVADGRGVFVQPALFEAFGLTVIEAMSSGLPVFATRHGGPLEIIEDGVSGFHIDPNDPEAVAEKLADFLEAARERPKYWEEISQAALARVSERYTWERYAERLMTIARCFGFWRFVLSRESQVMERYLQMIRHLQWRPLAHAVPME

SEQ ID NO: 1021 - protein, 793 aa, Artificial Sequence
  engineered sucrose synthase encoded in plasmid pA32824
MIEVLRQQLLDSPRSWRAFLRHLVASQRDSWLHTDLQHACKTFREQPPEGYPEDIGWLADFIAHCQEAIFRDPWMVFAWRLRPGVWEYVRIHVEQLAVEELSTDEYLQAKEQLVGLGAEGEAVLTVDFEDFRPVSQRLKDESTIGDGLTHLNRHLAGRIWTDLAAGRSAILEFLGLHRLDNQNLMLSNGNTDFDSLRQTVQYLGTLPRETPWAEFREDMRRRGFEPGWGNTAGRVRETMRLLMDLLDSPSPAALESFLDRIPMISNVLIVSIHGWFAQDKVLGRPDTGGQVVYILDQARALEREMRNRLRQQGVDVEPRILIATRLIPESDGTTCDQRLEPVHGAENVQILRVPFRYEDGRIHPHWISRFKVWPYLERYARDLEREVKAELGSRPDLIIGNYSDGGLVATILSEKLGVTQCNIAHALEKSKYPGSDLHWPLYEQDHHFACQFTADLIAMNAADIIVTSTYQEIAGNDREVGQYESHQDYTLPGLYRVENGIDVFDSKFNIVSPGADPSTYFSYARHEERFSSLWPEIESLLFGREPGPDIRGVLEDPQKPIILSVMRWDRIKNISGLLEMWGRSARLRSLANVVLIGGHLDVQASMDAEEREEIRRLHEIMDRYQLDGQVRWVGSHLDKRVVGELYRVVADGRGIFIQPALFEAFGLTVIEAMSSGLPVWATRHGGPLEIIEDGVSGFHIDPNDPEAVLEKIADWLEAARERPKYWEEISQAALARVSERYTWERYAERLMTIARCFGFWRFVLSRESQVMERYLQMFRHLQWRPLAHAVPME

SEQ ID NO: 1022 - protein, 793 aa, Artificial Sequence
  engineered sucrose synthase encoded in plasmid pA32825
MIEVLRQQLLDSPRSWRAFLRHLVASQRDSWLHTDLQHACKTFREQPPEGYPEDIGWLADFIAHCQEAIFRDPWMVFAWRLRPGVWEYVRIHVEQLAVEELSTDEYLQAKEQLVGLGAEGEAVLTVDFEDFRPVSQRLKDESTIGDGLTHLNRHLAGRIWTDLAAGRSAILEFLGLHRLDNQNLMLSNGNTDFDSLRQTVQYLGTLPRETPWAEFREDMRRRGFEPGWGNTAGRVRETMRLLMDLLDSPSPAALESFLDRIPMISNVLIVSIHGWFAQDKVLGRPDTGGQVVYILDQARALEREMRNRLRQQGVDVEPRILIATRLIPESDGTTCDQRLEPVHGAENVQILRVPFRYEDGRIHPHWISRFKVWPYLERYARDLEREVKAELGSRPDLIIGNYSDGGLVATILSEKLGVTQCNIAHALEKSKYPGSDLHWPLYEQDHHFACQFTADLIAMNAADIIVTSTYQEIAGNDREVGQYESHQDYTLPGLYRVENGIDVFDSKFNIVSPGADPSTYFSYARHEERFSSLWPEIESLLFGREPGPDIRGVLEDPQKPIVLSVMRLDRIKNLSGLLEWWGRSARLRSLANLVIIGGHVDVQASMDAEEREELRRMHEILDRYQLDGQVRWVGSHLDKRVVGELYRVVADGRGIFIQPALFEAFGLTVIEAMSSGLPVWATRHGGPLEIIEDGVSGFHIDPNDPEAVLEKWADVWEAARERPKYWEEISQAALARVSERYTWERYAERLMTIARCFGFWRFVLSRESQVMERYLQMFRHLQWRPLAHAVPME

SEQ ID NO: 1023 - protein, 793 aa, Artificial Sequence
  engineered sucrose synthase encoded in plasmid pA32826
MIEVLRQQLLDSPRSWRAFLRHLVASQRDSWLHTDLQHACKTFREQPPEGYPEDIGWLADFIAHCQEAIFRDPWMVFAWRLRPGVWEYVRIHVEQLAVEELSTDEYLQAKEQLVGLGAEGEAVLTVDFEDFRPVSQRLKDESTIGDGLTHLNRHLAGRIWTDLAAGRSAILEFLGLHRLDNQNLMLSNGNTDFDSLRQTVQYLGTLPRETPWAEFREDMRRRGFEPGWGNTAGRVRETMRLLMDLLDSPSPAALESFLDRIPMISNVLIVSIHGWFAQDKVLGRPDTGGQVVYILDQARALEREMRNRLRQQGVDVEPRILIATRLIPESDGTTCDQRLEPVHGAENVQILRVPFRYEDGRIHPHWISRFKVWPYLERYARDLEREVKAELGSRPDLIIGNYSDGGLVATILSEKLGVTQCNIAHALEKSKYPGSDLHWPLYEQDHHFACQFTADLIAMNAADIIVTSTYQEIAGNDREVGQYESHQDYTLPGLYRVENGIDVFDSKFNIVSPGADPSTYFSYARHEERFSSLWPEIESLLFGREPGPDIRGVLEDPQKPIVLSVARLDRIKNLSGLLEWWGRSARLRSLANWVIIGGHLDVQASMDAEEREEIRRLHEILDRYQLDGQVRWVGSHLDKRVVGELYRVVADGRGVFIQPALFEAFGLTVIEAMSSGLPVWATRHGGPLEIIEDGVSGFHIDPNDPEAVLEKWADWWEAARERPKYWEEISQAALARVSERYTWERYAERLMTIARCFGFWRFVLSRESQVMERYLQMFRHLQWRPLAHAVPME

SEQ ID NO: 1024 - protein, 793 aa, Artificial Sequence
  engineered sucrose synthase encoded in plasmid pA32828
MIEVLRQQLLDSPRSWRAFLRHLVASQRDSWLHTDLQHACKTFREQPPEGYPEDIGWLADFIAHCQEAIFRDPWMVFAWRLRPGVWEYVRIHVEQLAVEELSTDEYLQAKEQLVGLGAEGEAVLTVDFEDFRPVSQRLKDESTIGDGLTHLNRHLAGRIWTDLAAGRSAILEFLGLHRLDNQNLMLSNGNTDFDSLRQTVQYLGTLPRETPWAEFREDMRRRGFEPGWGNTAGRVRETMRLLMDLLDSPSPAALESFLDRIPMISNVLIVSIHGWFAQDKVLGRPDTGGQVVYILDQARALEREMRNRLRQQGVDVEPRILIATRLIPESDGTTCDQRLEPVHGAENVQILRVPFRYEDGRIHPHWISRFKVWPYLERYARDLEREVKAELGSRPDLIIGNYSDGGLVATILSEKLGVTQCNIAHALEKSKYPGSDLHWPLYEQDHHFACQFTADLIAMNAADIIVTSTYQEIAGNDREVGQYESHQDYTLPGLYRVENGIDVFDSKFNIVSPGADPSTYFSYARHEERFSSLWPEIESLLFGREPGPDIRGVLEDPQKPILLSVMRLDRIKNLSGLLELWGRSARLRSLANLVLIGGHVDVQASMDAEEREEIRRLHEILDRYQLDGQVRWVGSHLDKRVVGELYRVVADGRGWFVQPALFEAFGLTVIEAMSSGLPVWATRHGGPLEIIEDGVSGFHIDPNDPEAVLEKWADVWEAARERPKYWEEISQAALARVSERYTWERYAERLMTIARCFGFWRFVLSRESQVMERYLQMFRHLQWRPLAHAVPME

SEQ ID NO: 1025 - protein, 793 aa, Artificial Sequence
  engineered sucrose synthase encoded in plasmid pA32831
MIEVLRQQLLDSPRSWRAFLRHLVASQRDSWLHTDLQHACKTFREQPPEGYPEDIGWLADFIAHCQEAIFRDPWMVFAWRLRPGVWEYVRIHVEQLAVEELSTDEYLQAKEQLVGLGAEGEAVLTVDFEDFRPVSQRLKDESTIGDGLTHLNRHLAGRIWTDLAAGRSAILEFLGLHRLDNQNLMLSNGNTDFDSLRQTVQYLGTLPRETPWAEFREDMRRRGFEPGWGNTAGRVRETMRLLMDLLDSPSPAALESFLDRIPMISNVLIVSIHGWFAQDKVLGRPDTGGQVVYILDQARALEREMRNRLRQQGVDVEPRILIATRLIPESDGTTCDQRLEPVHGAENVQILRVPFRYEDGRIHPHWISRFKVWPYLERYARDLEREVKAELGSRPDLIIGNYSDGGLVATILSEKLGVTQCNIAHALEKSKYPGSDLHWPLYEQDHHFACQFTADLIAMNAADIIVTSTYQEIAGNDREVGQYESHQDYTLPGLYRVENGIDVFDSKFNIVSPGADPSTYFSYARHEERFSSLWPEIESMVFGREPGPDIRGVLEDPQKPLILSIARMDRIKNLSGLAELYGRSARLRSLANLIIWGGHVDVQASMDAEEREEIRRMHEIMDRYQLDGQMRWIGSHLDKRIVGEWYRWLADGRGVVVQPALFEAFGLTVIELMSSGLPVFATRHGGPLEIIEDGVSGFHIDPNDPEAVAEKLADFLEAARERPKYWEEISQAALARVSERYTWERYAERLMTIARCFGFWRFVLSRESQVMERYLQMFRHLQWRPLAHAVPME

SEQ ID NO: 1026 - protein, 793 aa, Artificial Sequence
  engineered sucrose synthase encoded in plasmid pA32834
MIEVLRQQLLDSPRSWRAFLRHLVASQRDSWLHTDLQHACKTFREQPPEGYPEDIGWLADFIAHCQEAIFRDPWMVFAWRLRPGVWEYVRIHVEQLAVEELSTDEYLQAKEQLVGLGAEGEAVLTVDFEDFRPVSQRLKDESTIGDGLTHLNRHLAGRIWTDLAAGRSAILEFLGLHRLDNQNLMLSNGNTDFDSLRQTVQYLGTLPRETPWAEFREDMRRRGFEPGWGNTAGRVRETMRLLMDLLDSPSPAALESFLDRIPMISNVLIVSIHGWFAQDKVLGRPDTGGQVVYILDQARALEREMRNRLRQQGVDVEPRILIATRLIPESDGTTCDQRLEPVHGAENVQILRVPFRYEDGRIHPHWISRFKVWPYLERYARDLEREVKAELGSRPDLIIGNYSDGGLVATILSEKLGVTQCNIAHALEKSKYPGSDLHWPLYEQDHHFACQFTADLIAMNAADIIVTSTYQEIAGNDREVGQYESHQDYTLPGLYRVENGIDVFDSKFNIVSPGADPSTYFSYARHEERFSSLWPEIESIVFGREPGPDIRGVLEDPQKPLILSIARMDRIKNLSGLAELYGRSARLRSLANLWIIGGHVDVQASMDAEEREEIRRMHEIMDRYQLDGQMRWIGSHLDKRWVGELYRWIADGRGVWVQPALFEAFGLTVIEVMSSGLPVFATRHGGPLEIIEDGVSGFHIDPNDPEAVAEKLADFLEAARERPKYWEEISQAALARVSERYTWERYAERLMTIARCFGFWRFVLSRESQVMERYLQMFRHLQWRPLAHAVPME

SEQ ID NO: 1027 - protein, 793 aa, Artificial Sequence
  engineered sucrose synthase encoded in plasmid pA32835
MIEVLRQQLLDSPRSWRAFLRHLVASQRDSWLHTDLQHACKTFREQPPEGYPEDIGWLADFIAHCQEAIFRDPWMVFAWRLRPGVWEYVRIHVEQLAVEELSTDEYLQAKEQLVGLGAEGEAVLTVDFEDFRPVSQRLKDESTIGDGLTHLNRHLAGRIWTDLAAGRSAILEFLGLHRLDNQNLMLSNGNTDFDSLRQTVQYLGTLPRETPWAEFREDMRRRGFEPGWGNTAGRVRETMRLLMDLLDSPSPAALESFLDRIPMISNVLIVSIHGWFAQDKVLGRPDTGGQVVYILDQARALEREMRNRLRQQGVDVEPRILIATRLIPESDGTTCDQRLEPVHGAENVQILRVPFRYEDGRIHPHWISRFKVWPYLERYARDLEREVKAELGSRPDLIIGNYSDGGLVATILSEKLGVTQCNIAHALEKSKYPGSDLHWPLYEQDHHFACQFTADLIAMNAADIIVTSTYQEIAGNDREVGQYESHQDYTLPGLYRVENGIDVFDSKFNIVSPGADPSTYFSYARHEERFSSLWPEIESILFGREPGPDIRGVLEDPQKPLIVSIARMDRIKNLSGLAELYGRSARLRSLANLLIIGGHVDVQASMDAEEREEIRRMHEIMDRYQLDGQMRWMGSHLDKRWVGEWYRWVADGRGVLVQPALFEAFGLTVIEIMSSGLPVFATRHGGPLEIIEDGVSGFHIDPNDPEAVAEKLADFLEAARERPKYWEEISQAALARVSERYTWERYAERLMTIARCFGFWRFVLSRESQVMERYLQMFRHLQWRPLAHAVPME

SEQ ID NO: 1028 - protein, 793 aa, Artificial Sequence
  engineered sucrose synthase encoded in plasmid pA32837
MIEVLRQQLLDSPRSWRAFLRHLVASQRDSWLHTDLQHACKTFREQPPEGYPEDIGWLADFIAHCQEAIFRDPWMVFAWRLRPGVWEYVRIHVEQLAVEELSTDEYLQAKEQLVGLGAEGEAVLTVDFEDFRPVSQRLKDESTIGDGLTHLNRHLAGRIWTDLAAGRSAILEFLGLHRLDNQNLMLSNGNTDFDSLRQTVQYLGTLPRETPWAEFREDMRRRGFEPGWGNTAGRVRETMRLLMDLLDSPSPAALESFLDRIPMISNVLIVSIHGWFAQDKVLGRPDTGGQVVYILDQARALEREMRNRLRQQGVDVEPRILIATRLIPESDGTTCDQRLEPVHGAENVQILRVPFRYEDGRIHPHWISRFKVWPYLERYARDLEREVKAELGSRPDLIIGNYSDGGLVATILSEKLGVTQCNIAHALEKSKYPGSDLHWPLYEQDHHFACQFTADLIAMNAADIIVTSTYQEIAGNDREVGQYESHQDYTLPGLYRVENGIDVFDSKFNIVSPGADPSTYFSYARHEERFSSLWPEIESMVFGREPGPDIRGVLEDPQKPIILSVARMDRIKNLSGLAELYGRSARLRSLANLVIIGGHVDVQASMDAEEREEIRRMHEIMDRYQLDGQMRWQGSHLDKRWVGELYRWVADGRGVAVQPALFEAFGLTVIEQMSSGLPVFATRHGGPLEIIEDGVSGFHIDPNDPEAVAEKLADFLEAARERPKYWEEISQAALARVSERYTWERYAERLMTIARCFGFWRFVLSRESQVMERYLQMFRHLQWRPLAHAVPME

SEQ ID NO: 1029 - protein, 793 aa, Artificial Sequence
  engineered sucrose synthase encoded in plasmid pA32842
MIEVLRQQLLDSPRSWRAFLRHLVASQRDSWLHTDLQHACKTFREQPPEGYPEDIGWLADFIAHCQEAIFRDPWMVFAWRLRPGVWEYVRIHVEQLAVEELSTDEYLQAKEQLVGLGAEGEAVLTVDFEDFRPVSQRLKDESTIGDGLTHLNRHLAGRLWTDVAAGRSAILEWLGLHRIDNQNLWMSNGNTDVDSLRQILQYLGTLPRETPLAELREDWRRRGWEPGWGNTAGRIRETLRILWDLWDSPSPAAWESWLDRVPIISNVLIVSIHGWFAQDKVLGRPDTGGQVVYILDQARALEREMRNRLRQQGIDVEPRILIATRLIPESDGTTCDQRLEPVHGAENVQILRVPFRYEDGRIHPHWISRFKVWPYLERYARDLEREVKAELGSRPDLIIGNYSDGGLVATILSEKLGVTQCNIAHALEKSKYPGSDLHWPLYEQDHHFACQFTADLIAMNAADIIVTSTYQEIAGNDREVGQYESHQDYTLPGLYRVENGIDVFDSKFNIVSPGADPSTYFSYARHEERFSSLWPEIESLLFGREPGPDIRGVLEDPQKPIILSVARMDRIKNLSGLAELYGRSARLRSLANLVIIGGHVDVQASMDAEEREEIRRMHEIMDRYQLDGQMRWVGSHLDKRVVGELYRVVADGRGVFVQPALFEAFGLTVIEAMSSGLPVFATRHGGPLEIIEDGVSGFHIDPNDPEAVAEKLADFLEAARERPKYWEEISQAALARVSERYTWERYAERLMTIARIFGWWRFMLSRESQVMERYLQMFRHLQWRPLAHAVPME

SEQ ID NO: 1030 - protein, 793 aa, Artificial Sequence
  engineered sucrose synthase encoded in plasmid pA32844
MIEVLRQQLLDSPRSWRAFLRHLVASQRDSWLHTDLQHACKTFREQPPEGYPEDIGWLADFIAHCQEAIFRDPWMVFAWRLRPGVWEYVRIHVEQLAVEELSTDEYLQAKEQLVGLGAEGEAVLTVDFEDFRPVSQRLKDESTIGDGLTHLNRHLAGRLWTDLAAGRSALLEWLGLHRIDNQNLWWSNGNTDWDSVRQVLQYLGTIPRETPWAELREDWRRRGWEPGWGNTAGRVRETLRILWDLIDSPSPAALESWLDRIPIISNVLIVSIHGWFAQDKVLGRPDTGGQVVYILDQARALEREMRNRLRQQGIDVEPRILIATRLIPESDGTTCDQRLEPVHGAENVQILRVPFRYEDGRIHPHWISRFKVWPYLERYARDLEREVKAELGSRPDLIIGNYSDGGLVATILSEKLGVTQCNIAHALEKSKYPGSDLHWPLYEQDHHFACQFTADLIAMNAADIIVTSTYQEIAGNDREVGQYESHQDYTLPGLYRVENGIDVFDSKFNIVSPGADPSTYFSYARHEERFSSLWPEIESLLFGREPGPDIRGVLEDPQKPIILSVARMDRIKNLSGLAELYGRSARLRSLANLVIIGGHVDVQASMDAEEREEIRRMHEIMDRYQLDGQMRWVGSHLDKRVVGELYRVVADGRGVFVQPALFEAFGLTVIEAMSSGLPVFATRHGGPLEIIEDGVSGFHIDPNDPEAVAEKLADFLEAARERPKYWEEISQAALARVSERYTWERYAERLMTIARVFGLWRFILSRESQVMERYLQMFRHLQWRPLAHAVPME

SEQ ID NO: 1031 - protein, 793 aa, Artificial Sequence
  engineered sucrose synthase encoded in plasmid pA32845
MIEVLRQQLLDSPRSWRAFLRHLVASQRDSWLHTDLQHACKTFREQPPEGYPEDIGWLADFIAHCQEAIFRDPWMVFAWRLRPGVWEYVRIHVEQLAVEELSTDEYLQAKEQLVGLGAEGEAVLTVDFEDFRPVSQRLKDESTIGDGLTHLNRHLAGRMWTDTAAGRSALLEWLGLHRLDNQNLGLSNGNTDFDSLRQVMQYLGTQPRETPLAELREDLRRRGFEPGLGNTAGRVRETLRLLVDLLDSPSPAALESFLDRVPLISNVLIVSIHGWFAQDKVLGRPDTGGQVVYILDQARALEREMRNRLRQQGVDVEPRILIATRLIPESDGTTCDQRLEPVHGAENVQILRVPFRYEDGRIHPHWISRFKVWPYLERYARDLEREVKAELGSRPDLIIGNYSDGGLVATILSEKLGVTQCNIAHALEKSKYPGSDLHWPLYEQDHHFACQFTADLIAMNAADIIVTSTYQEIAGNDREVGQYESHQDYTLPGLYRVENGIDVFDSKFNIVSPGADPSTYFSYARHEERFSSLWPEIESLLFGREPGPDIRGVLEDPQKPIILSVARMDRIKNLSGLAELYGRSARLRSLANLVIIGGHVDVQASMDAEEREEIRRMHEIMDRYQLDGQMRWVGSHLDKRVVGELYRVVADGRGVFVQPALFEAFGLTVIEAMSSGLPVFATRHGGPLEIIEDGVSGFHIDPNDPEAVAEKLADFLEAARERPKYWEEISQAALARVSERYTWERYAERLMTIARAFGFWRFVLSRESQVMERYLQMFRHLQWRPLAHAVPME

SEQ ID NO: 1032 - protein, 793 aa, Artificial Sequence
  engineered sucrose synthase encoded in plasmid pA32847
MIEVLRQQLLDSPRSWRAFLRHLVASQRDSWLHTDLQHACKTFREQPPEGYPEDIGWLADFIAHCQEAIFRDPWMVFAWRLRPGVWEYVRIHVEQLAVEELSTDEYLQAKEQLVGLGAEGEAVLTVDFEDFRPVSQRLKDESTIGDGLTHLNRHLAGRNWTDNAAGRSAILEFLGLHRLDNQNLTLSNGNTDLDSLRQVLQYLGTLPRETPLAELREDLRRRGWEPGLGNTAGRVRETLRLLTDLLDSPSPAALESFLDRIPMISNVLIVSIHGWFAQDKVLGRPDTGGQVVYILDQARALEREMRNRLRQQGIDVEPRILIATRLIPESDGTTCDQRLEPVHGAENVQILRVPFRYEDGRIHPHWISRFKVWPYLERYARDLEREVKAELGSRPDLIIGNYSDGGLVATILSEKLGVTQCNIAHALEKSKYPGSDLHWPLYEQDHHFACQFTADLIAMNAADIIVTSTYQEIAGNDREVGQYESHQDYTLPGLYRVENGIDVFDSKFNIVSPGADPSTYFSYARHEERFSSLWPEIESLLFGREPGPDIRGVLEDPQKPIILSVARMDRIKNLSGLAELYGRSARLRSLANLVIIGGHVDVQASMDAEEREEIRRMHEIMDRYQLDGQMRWVGSHLDKRVVGELYRVVADGRGVFVQPALFEAFGLTVIEAMSSGLPVFATRHGGPLEIIEDGVSGFHIDPNDPEAVAEKLADFLEAARERPKYWEEISQAALARVSERYTWERYAERLMTIARAFGFWRFVLSRESQVMERYLQMFRHLQWRPLAHAVPME

SEQ ID NO: 1033 - protein, 793 aa, Artificial Sequence
  engineered sucrose synthase encoded in plasmid pA32848
MIEVLRQQLLDSPRSWRAFLRHLVASQRDSWLHTDLQHACKTFREQPPEGYPEDIGWLADFIAHCQEAIFRDPWMVFAWRLRPGVWEYVRIHVEQLAVEELSTDEYLQAKEQLVGLGAEGEAVLTVDFEDFRPVSQRLKDESTIGDGLTHLNRHLAGRIWTDLAAGRSAILEFLGLHRLDNQNLMLSNGNTDFDSLRQTVQYLGTLPRETPWAEFREDMRRRGFEPGWGNTAGRVRETMRLLMDLLDSPSPAALESFLDRIPMISNILWVSIHGWFAQDKVLGRPDTGGQVVLILDQARALEREIRNRLRQQGVDVEPRILWATRLIPESDGTTCDQRLEPVHGAENVQILRVPFRYEDGRIHPHWISRFKVWPYLERYARDLEREVKAELGSRPDVIVGNYSDGGLVATILSEKLGVTQLNMAHALEKSKYPGSDLHWPLYEQDHHFACQFTADLIAMNAADVIVTSTYQEIAGNDREVGQYESHQDYTLPGLYRVENGIDVFDSKFNIISPGADPSTYFSYARHEERFSSLWPEIESLLFGREPGPDIRGVLEDPQKPIILSVARMDRIKNLSGLAELYGRSARLRSLANLVIIGGHVDVQASMDAEEREEIRRMHEIMDRYQLDGQMRWVGSHLDKRVVGELYRVVADGRGVFVQPALFEAFGLTVIEAMSSGLPVFATRHGGPLEIIEDGVSGFHIDPNDPEAVAEKLADFLEAARERPKYWEEISQAALARVSERYTWERWAERILTMWRCWGFWRFVLSRESQVMERYLQMFRHLQWRPLAHAVPME

SEQ ID NO: 1034 - protein, 793 aa, Artificial Sequence
  engineered sucrose synthase encoded in plasmid pA32854
MIEVLRQQLLDSPRSWRAFLRHLVASQRDSWLHTDLQHACKTFREQPPEGYPEDIGWLADFIAHCQEAIFRDPWMVFAWRLRPGVWEYVRIHVEQLAVEELSTDEYLQAKEQLVGLGAEGEAVLTVDFEDFRPVSQRLKDESTIGDGLTHLNRHLAGRIWTDLAAGRSAILEFLGLHRLDNQNLMLSNGNTDFDSLRQTVQYLGTLPRETPWAEFREDMRRRGFEPGWGNTAGRVRETMRLLMDLLDSPSPAALESFLDRIPMISNVLIISVHGWFAQDKVLGRPDTGGQVVYILDQARALEREMRNRLRQQGVDVEPRIIIITRLIPESDGTTCDQRLEPVHGAENVQILRIPFRYEDGRIHPHWISRFKVWPYLERWVRDVEREIKAELGSRPDLIIGNYSDGGLIATILSEKWGITQCNIAHALEKSKYPGSDLHWPLYEQDHHFACQFTADLIAMNAADIIVTSTYQEIAGNDREVGQYESHQDYTLPGLYRVENGIDVFDSKFNIVSPGADPSTYFSYARHEERFSSLWPEIESLLFGREPGPDIRGVLEDPQKPIILSVARMDRIKNLSGLAELYGRSARLRSLANLVIIGGHVDVQASMDAEEREEIRRMHEIMDRYQLDGQMRWVGSHLDKRVVGELYRVVADGRGVFVQPALFEAFGLTVIEAMSSGLPVFATRHGGPLEIIEDGVSGFHIDPNDPEAVAEKLADFLEAARERPKYWEEISQAALARVSERYTWERYAERLMTIARCFGFWRFVLSRESQVMERYLQMFRHLQWRPLAHAVPME

SEQ ID NO: 1035 - protein, 793 aa, Artificial Sequence
  engineered sucrose synthase encoded in plasmid pA32855
MIEVLRQQLLDSPRSWRAFLRHLVASQRDSWLHTDLQHACKTFREQPPEGYPEDIGWLADFIAHCQEAIFRDPWMVFAWRLRPGVWEYVRIHVEQLAVEELSTDEYLQAKEQLVGLGAEGEAVLTVDFEDFRPVSQRLKDESTIGDGLTHLNRHLAGRIWTDLAAGRSAILEFLGLHRLDNQNLMLSNGNTDFDSLRQTVQYLGTLPRETPWAEFREDMRRRGFEPGWGNTAGRVRETMRLLMDLLDSPSPAALESFLDRIPMISNVLIISVHGWFAQDKVLGRPDTGGQVVYILDQARALEREMRNRLRQQGVDVEPRIIIITRLIPESDGTTCDQRLEPVHGAENVQILRIPFRYEDGRIHPHWISRFKVWPYLERWVRDVEREIKAELGSRPDLIIGNYSDGGLIATILSEKLGVTQCNIAHALEKSKYPGSDLHWPLYEQDHHFACQFTADLIAMNAADIIVTSTYQEIAGNDREVGQYESHQDYTLPGLYRVENGIDVFDSKFNIVSPGADPSTYFSYARHEERFSSLWPEIESLLFGREPGPDIRGVLEDPQKPIILSVARMDRIKNLSGLAELYGRSARLRSLANLVIIGGHVDVQASMDAEEREEIRRMHEIMDRYQLDGQMRWVGSHLDKRVVGELYRVVADGRGVFVQPALFEAFGLTVIEAMSSGLPVFATRHGGPLEIIEDGVSGFHIDPNDPEAVAEKLADFLEAARERPKYWEEISQAALARVSERYTWERYAERLMTIARCFGFWRFVLSRESQVMERYLQMFRHLQWRPLAHAVPME

SEQ ID NO: 1036 - protein, 793 aa, Artificial Sequence
  engineered sucrose synthase encoded in plasmid pA32858
MIEVLRQQLLDSPRSWRAFLRHLVASQRDSWLHTDLQHACKTFREQPPEGYPEDIGWLADFIAHCQEAIFRDPWMVFAWRLRPGVWEYVRIHVEQLAVEELSTDEYLQAKEQLVGLGAEGEAVLTVDFEDFRPVSQRLKDESTIGDGLTHLNRHLAGRIWTDLAAGRSAILEFLGLHRLDNQNLMLSNGNTDFDSLRQTVQYLGTLPRETPWAEFREDMRRRGFEPGWGNTAGRVRETMRLLMDLLDSPSPAALESFLDRIPMISNVTIISIHGWFAQDKVLGRPDTGGQVVYILDQARALEREMRNRLRQQGVDVEPRILIVTRLIPESDGTTCDQRLEPVHGAENVQILRVPFRYEDGRIHPHWISRFKVWPYLERFARDAEREVKAELGSRPDLIIGNYSDGGLVATIMSEKLGVTQCNIAHALEKSKYPGSDLHWPLYEQDHHFACQFTADLIAMNAADIIVTSTYQEIAGNDREVGQYESHQDYTLPGLYRVENGIDVFDSKFNIVSPGADPSTYFSYARHEERFSSLWPEIESLLFGREPGPDIRGVLEDPQKPIILSVARMDRIKNLSGLAELYGRSARLRSLANLVIIGGHVDVQASMDAEEREEIRRMHEIMDRYQLDGQMRWVGSHLDKRVVGELYRVVADGRGVFVQPALFEAFGLTVIEAMSSGLPVFATRHGGPLEIIEDGVSGFHIDPNDPEAVAEKLADFLEAARERPKYWEEISQAALARVSERYTWERYAERLMTIARCFGFWRFVLSRESQVMERYLQMFRHLQWRPLAHAVPME

SEQ ID NO: 1037 - protein, 793 aa, Artificial Sequence
  engineered sucrose synthase encoded in plasmid pA32863
MIEELRQQLLDSPRSWRAFLRHLVASQRDSWLHTDLQRACKTFREQPPEGYPEDIGWLADFVAHTQEAIFRDPWMVFAWRLRPGVWEYVRIHVEQLAVEELSTDEYLQAKEQLVGLGAEGEAVLTVDFEDFRPVSQRLKDESTIGDGLTHLNRHLAGRIWTDLAAGRSQILEFLGLHRLDNQNLMLSNGNTDFDSLRQTVQYLGTLPRETPWAEFREDMRRRGFEPGWGNTAGRVRETMRLLMDLLDSPSPAALESFLDRIPMISNVLIVSIHGWFAQDKVLGRPDTGGQVVYILDQARALEREMRNRLRQQGVDVEPRILIATRLIPESDGTTCDQRLEPVHGAENVQILRVPFRYEDGRIHPHWISRFKVWPYLERYASDLEREVKAELGSRPDLIIGNYSDGNLVATLLSEKLGVTQCNIAHALEKSKYLYSDLHWPDHEQDHHFACQFTADLIAMNAADIIVTSTYQEIAGNDREVGQYESHQDYTLPGLYRVENGIDVFDSKFNIVSPGADPRTYFSYARTEERFSSLWPEIESLLFGREPGPDIRGVLEDRQKPIILSMGRLDRIKNLSGLLELWGRSSRLRSLANLVIIGGHLDVQNSMDAEEREELRRLHEILDHYQLDGQVRIVGSQLDKTVVGELYRVVADGRGIFIQPALFEAFGLTVIEAMSSGLPVWATRHGGPLEIIEDGVSGFHIDPNDPEATVEKWADWIEAARERPKYWEEISDAALARVSERYTWERYAERLMTIARCFGFWRFVLSRESQVMERYLQMFRHLQWRPLAHAVPME

SEQ ID NO: 1038 - protein, 793 aa, Artificial Sequence
  engineered sucrose synthase encoded in plasmid pA32864
MIEELRQQLLDSPRSWRAFLRHLVASQRDSWLHTDLQRACKTFREQPPEGYPEDIGWLADFVAHTQEAIFRDPWMVFAWRLRPGVWEYVRIHVEQLAVEELSTDEYLQAKEQLVGLGAEGEAVLTVDFEDFRPVSQRLKDESTIGDGLTHLNRHLAGRIWTDLAAGRSQILEFLGLHRLDNQNLMLSNGNTDFDSLRQTVQYLGTLPRETPWAEFREDMRRRGFEPGWGNTAGRVRETMRLLMDLLDSPSPAALESFLDRIPMISNVLIVSIHGWFAQDKVLGRPDTGGQVVYILDQARALEREMRNRLRQQGVDVEPRILIATRLIPESDGTTCDQRLEPVHGAENVQILRVPFRYEDGRIHPHWISRFKVWPYLERYASDLEREVKAELGSRPDLIIGNYSDGNLVATLLSEKLGVTQCNIAHALEKSKYLYSDLHWPDHEQDHHFACQFTADLIAMNAADIIVTSTYQEIAGNDREVGQYESHQDYTLPGLYRVENGIDVFDSKFNIVSPGADPRTYFSYARTEERFSSLWPEIESLLFGREPGPDIRGVLEDRQKPILLSMMRLDRIKNLSGLLELWGRSSRLRSLANLVLIGGHVDVQNSMDAEEREEIRRLHEILDHYQLDGQVRLVGSQLDKTVVGELYRVVADGRGWFIQPALFEAFGLTVIEAMSSGLPVVATRHGGPLEIIEDGVSGFHIDPNDPEATVEKWADIIEAARERPKYWEEISDAALARVSERYTWERYAERLMTIARCFGFWRFVLSRESQVMERYLQMFRHLQWRPLAHAVPME

SEQ ID NO: 1039 - protein, 793 aa, Artificial Sequence
  engineered sucrose synthase encoded in plasmid pA32865
MIEELRQQLLDSPRSWRAFLRHLVASQRDSWLHTDLQRACKTFREQPPEGYPEDIGWLADFVAHTQEAIFRDPWMVFAWRLRPGVWEYVRIHVEQLAVEELSTDEYLQAKEQLVGLGAEGEAVLTVDFEDFRPVSQRLKDESTIGDGLTHLNRHLAGRIWTDLAAGRSQILEFLGLHRLDNQNLMLSNGNTDFDSLRQTVQYLGTLPRETPWAEFREDMRRRGFEPGWGNTAGRVRETMRLLMDLLDSPSPAALESFLDRIPMISNVLIVSIHGWFAQDKVLGRPDTGGQVVYILDQARALEREMRNRLRQQGVDVEPRILIATRLIPESDGTTCDQRLEPVHGAENVQILRVPFRYEDGRIHPHWISRFKVWPYLERYASDLEREVKAELGSRPDLIIGNYSDGNLVATLLSEKLGVTQCNIAHALEKSKYLYSDLHWPDHEQDHHFACQFTADLIAMNAADIIVTSTYQEIAGNDREVGQYESHQDYTLPGLYRVENGIDVFDSKFNIVSPGADPRTYFSYARTEERFSSLWPEIESLLFGREPGPDIRGVLEDRQKPIILSMGRLDRIKNLSGLLELWGRSSRLRSLANLVIIGGHIDVQNSMDAEEREEIRRLHEILDHYQLDGQIRLVGSQLDKTVVGELYRVVADGRGIFIQPALFEAFGLTVIEAMSSGLPVWATRHGGPLEIIEDGVSGFHIDPNDPEATVEKWADWWEAARERPKYWEEISDAALARVSERYTWERYAERLMTIARCFGFWRFVLSRESQVMERYLQMFRHLQWRPLAHAVPME

SEQ ID NO: 1040 - protein, 793 aa, Artificial Sequence
  engineered sucrose synthase encoded in plasmid pA32866
MIEELRQQLLDSPRSWRAFLRHLVASQRDSWLHTDLQRACKTFREQPPEGYPEDIGWLADFVAHTQEAIFRDPWMVFAWRLRPGVWEYVRIHVEQLAVEELSTDEYLQAKEQLVGLGAEGEAVLTVDFEDFRPVSQRLKDESTIGDGLTHLNRHLAGRIWTDLAAGRSQILEFLGLHRLDNQNLMLSNGNTDFDSLRQTVQYLGTLPRETPWAEFREDMRRRGFEPGWGNTAGRVRETMRLLMDLLDSPSPAALESFLDRIPMISNVLIVSIHGWFAQDKVLGRPDTGGQVVYILDQARALEREMRNRLRQQGVDVEPRILIATRLIPESDGTTCDQRLEPVHGAENVQILRVPFRYEDGRIHPHWISRFKVWPYLERYASDLEREVKAELGSRPDLIIGNYSDGNLVATLLSEKLGVTQCNIAHALEKSKYLYSDLHWPDHEQDHHFACQFTADLIAMNAADIIVTSTYQEIAGNDREVGQYESHQDYTLPGLYRVENGIDVFDSKFNIVSPGADPRTYFSYARTEERFSSLWPEIESLLFGREPGPDIRGVLEDRQKPILLSMGRLDRIKNLSGLLELWGRSSRLRSLANLVIIGGHWDVQNSMDAEEREEIRRLHEILDHYQLDGQVRIVGSQLDKTVVGELYRVVADGRGWFIQPALFEAFGLTVIEAMSSGLPVIATRHGGPLEIIEDGVSGFHIDPNDPEATAEKIADIIEAARERPKYWEEISDAALARVSERYTWERYAERLMTIARCFGFWRFVLSRESQVMERYLQMFRHLQWRPLAHAVPME

SEQ ID NO: 1041 - protein, 793 aa, Artificial Sequence
  engineered sucrose synthase encoded in plasmid pA32868
MIEELRQQLLDSPRSWRAFLRHLVASQRDSWLHTDLQRACKTFREQPPEGYPEDIGWLADFVAHTQEAIFRDPWMVFAWRLRPGVWEYVRIHVEQLAVEELSTDEYLQAKEQLVGLGAEGEAVLTVDFEDFRPVSQRLKDESTIGDGLTHLNRHLAGRIWTDLAAGRSQILEFLGLHRLDNQNLMLSNGNTDFDSLRQTVQYLGTLPRETPWAEFREDMRRRGFEPGWGNTAGRVRETMRLLMDLLDSPSPAALESFLDRIPMISNVLIVSIHGWFAQDKVLGRPDTGGQVVYILDQARALEREMRNRLRQQGVDVEPRILIATRLIPESDGTTCDQRLEPVHGAENVQILRVPFRYEDGRIHPHWISRFKVWPYLERYASDLEREVKAELGSRPDLIIGNYSDGNLVATLLSEKLGVTQCNIAHALEKSKYLYSDLHWPDHEQDHHFACQFTADLIAMNAADIIVTSTYQEIAGNDREVGQYESHQDYTLPGLYRVENGIDVFDSKFNIVSPGADPRTYFSYARTEERFSSLWPEIESLLFGREPGPDIRGVLEDRQKPIILSMSRLDRIKNQSGLMELVGRSSRLRSLANLVVIGGHVDVQNSMDAEEREEIRRIHEIIDHYQLDGQARWVGSQLDKTVVGELYRVVADGRGVFVQPALFEAFGLTVIEAMSSGLPVFATRHGGPLEIIEDGVSGFHIDPNDPEATAEKLADFFEAARERPKYWEEISDAALARVSERYTWERYAERLMTIARCFGFWRFVLSRESQVMERYLQMFRHLQWRPLAHAVPME

SEQ ID NO: 1042 - protein, 793 aa, Artificial Sequence
  engineered sucrose synthase encoded in plasmid pA32876
MIEELRQQLLDSPRSWRAFLRHLVASQRDSWLHTDLQRACKTFREQPPEGYPEDIGWLADFVAHTQEAIFRDPWMVFAWRLRPGVWEYVRIHVEQLAVEELSTDEYLQAKEQLVGLGAEGEAVLTVDFEDFRPVSQRLKDESTIGDGLTHLNRHLAGRIWTDWAAGRSQLIEWLGLHRIDNQNLWLSNGNTDLDSIRQILQYLGTLPRETPWAEFREDLRRRGIEPGWGNTAGRVRETWRILMDLLDSPSPAAIESWLDRLPLISNVLIVSIHGWFAQDKVLGRPDTGGQVVYILDQARALEREMRNRLRQQGIDIEPRILIATRLIPESDGTTCDQRLEPVHGAENVQILRVPFRYEDGRIHPHWISRFKVWPYLERYASDLEREVKAELGSRPDLIIGNYSDGNLVATLLSEKLGVTQCNIAHALEKSKYLYSDLHWPDHEQDHHFACQFTADLIAMNAADIIVTSTYQEIAGNDREVGQYESHQDYTLPGLYRVENGIDVFDSKFNIVSPGADPRTYFSYARTEERFSSLWPEIESLLFGREPGPDIRGVLEDRQKPIILSMARMDRIKNLSGLAELYGRSSRLRSLANLVIIGGHVDVQNSMDAEEREEIRRMHEIMDHYQLDGQMRWVGSQLDKTVVGELYRVVADGRGVFVQPALFEAFGLTVIEAMSSGLPVFATRHGGPLEIIEDGVSGFHIDPNDPEATAEKLADFLEAARERPKYWEEISDAALARVSERYTWERYAERLMTIARVFGWWRFLLSRESQVMERYLQMFRHLQWRPLAHAVPME

SEQ ID NO: 1043 - protein, 793 aa, Artificial Sequence
  engineered sucrose synthase encoded in plasmid pA32880
MIEELRQQLLDSPRSWRAFLRHLVASQRDSWLHTDLQRACKTFREQPPEGYPEDIGWLADFVAHTQEAIFRDPWMVFAWRLRPGVWEYVRIHVEQLAVEELSTDEYLQAKEQLVGLGAEGEAVLTVDFEDFRPVSQRLKDESTIGDGLTHLNRHTAGRMWTDQAAGRSQMLEFLGLHRIDNQNLMLSNGNTDVDSLRQLIQYLGTLPRETPWAEFREDARRRGFEPGWGNTAGRVRETLRLLLDLLDSPSPAALESFLDRIPMISNVLIVSIHGWFAQDKVLGRPDTGGQVVYILDQARALEREMRNRLRQQGVDVEPRILIATRLIPESDGTTCDQRLEPVHGAENVQILRVPFRYEDGRIHPHWISRFKVWPYLERYASDLEREVKAELGSRPDLIIGNYSDGNLVATLLSEKLGVTQCNIAHALEKSKYLYSDLHWPDHEQDHHFACQFTADLIAMNAADIIVTSTYQEIAGNDREVGQYESHQDYTLPGLYRVENGIDVFDSKFNIVSPGADPRTYFSYARTEERFSSLWPEIESLLFGREPGPDIRGVLEDRQKPIILSMARMDRIKNLSGLAELYGRSSRLRSLANLVIIGGHVDVQNSMDAEEREEIRRMHEIMDHYQLDGQMRWVGSQLDKTVVGELYRVVADGRGVFVQPALFEAFGLTVIEAMSSGLPVFATRHGGPLEIIEDGVSGFHIDPNDPEATAEKLADFLEAARERPKYWEEISDAALARVSERYTWERYAERLMTIARAFGFWRFMLSRESQVMERYLQMFRHLQWRPLAHAVPME

SEQ ID NO: 1044 - protein, 793 aa, Artificial Sequence
  engineered sucrose synthase encoded in plasmid pA32916
MIEELRQQLLDSPRSWRAFLRHLVASQRDSWLHTDLQRACKTFREQPPEGYPEDIGWLADFVAHTQEAIFRDPWMVFAWRLRPGVWEYVRIHVEQLAVEELSTDEYLQAKEQLVGLGAEGEAVLTVDFEDFRPVSQRLKDESTIGDGLTHLNRHLAGRMWTDSAAGRSQLLEFNGLHRLDNQNLLYSNGNTDFDSIRQLMQYLGTLPRETPLAELREDMRRRGFEPGWGNTAGRVRETMRLLYDLLDSPSPAALESFLDRIPMISNVLIVSIHGWFAQDKVLGRPDTGGQVVYILDQARALEREMRNRLRQQGIDVEPRILIATRLIPESDGTTCDQRLEPVHGAENVQILRVPFRYEDGRIHPHWISRFKVWPYLERYASDLEREVKAELGSRPDLIIGNYSDGNLVATLLSEKLGVTQCNIAHALEKSKYLYSDLHWPDHEQDHHFACQFTADLIAMNAADIIVTSTYQEIAGNDREVGQYESHQDYTLPGLYRVENGIDVFDSKFNIVSPGADPRTYFSYARTEERFSSLWPEIESLLFGREPGPDIRGVLEDRQKPIILSMARMDRIKNLSGLAELYGRSSRLRSLANLVIIGGHVDVQNSMDAEEREEIRRMHEIMDHYQLDGQMRWVGSQLDKTVVGELYRVVADGRGVFVQPALFEAFGLTVIEAMSSGLPVFATRHGGPLEIIEDGVSGFHIDPNDPEATAEKLADFLEAARERPKYWEEISDAALARVSERYTWERYAERLMTIARAFGFWRFVLSRESQVMERYLQMFRHLQWRPLAHAVPME

SEQ ID NO: 1045 - protein, 793 aa, Artificial Sequence
  engineered sucrose synthase encoded in plasmid pA32919
MIEELRQQLLDSPRSWRAFLRHLVASQRDSWLHTDLQRACKTFREQPPEGYPEDIGWLADFVAHTQEAIFRDPWMVFAWRLRPGVWEYVRIHVEQLAVEELSTDEYLQAKEQLVGLGAEGEAVLTVDFEDFRPVSQRLKDESTIGDGLTHLNRHLAGRIWTDLAAGRSQILEFLGLHRLDNQNLMLSNGNTDFDSLRQTVQYLGTLPRETPWAEFREDMRRRGFEPGWGNTAGRVRETMRLLMDLLDSPSPAALESFLDRIPMISNILIVSIHGWFAQDKVLGRPDTGGQVVWILDQARAIERELRNRLRQQGVDVEPRILIATRLIPESDGTTCDQRLEPVHGAENVQILRVPFRYEDGRIHPHWISRFKVWPYLERYASDLEREVKAELGSRPDVIIGNYSDGNLVATLLSEKLGVTQINFAHALEKSKYLYSDLHWPDHEQDHHFACQFTADLIAMNAADLIVTSTYQEIAGNDREVGQYESHQDYTLPGLYRVENGIDVFDSKFNIISPGADPRTYFSYARTEERFSSLWPEIESLLFGREPGPDIRGVLEDRQKPIILSMARMDRIKNLSGLAELYGRSSRLRSLANLVIIGGHVDVQNSMDAEEREEIRRMHEIMDHYQLDGQMRWVGSQLDKTVVGELYRVVADGRGVFVQPALFEAFGLTVIEAMSSGLPVFATRHGGPLEIIEDGVSGFHIDPNDPEATAEKLADFLEAARERPKYWEEISDAALARVSERYTWERWAERLLTLWRCWGFWRFVLSRESQVMERYLQMFRHLQWRPLAHAVPME

SEQ ID NO: 1046 - protein, 793 aa, Artificial Sequence
  engineered sucrose synthase encoded in plasmid pA32924
MIEELRQQLLDSPRSWRAFLRHLVASQRDSWLHTDLQRACKTFREQPPEGYPEDIGWLADFVAHTQEAIFRDPWMVFAWRLRPGVWEYVRIHVEQLAVEELSTDEYLQAKEQLVGLGAEGEAVLTVDFEDFRPVSQRLKDESTIGDGLTHLNRHLAGRIWTDLAAGRSQILEFLGLHRLDNQNLMLSNGNTDFDSLRQTVQYLGTLPRETPWAEFREDMRRRGFEPGWGNTAGRVRETMRLLMDLLDSPSPAALESFLDRIPMISNVLIISVHGWFAQDKVLGRPDTGGQVVYILDQARALEREMRNRLRQQGVDVEPRIIIITRLIPESDGTTCDQRLEPVHGAENVQILRIPFRYEDGRIHPHWISRFKVWPYLERWVSDLEREIKAELGSRPDLIIGNYSDGNLIATLLSEKWGVTQCNIAHALEKSKYLYSDLHWPDHEQDHHFACQFTADLIAMNAADIIVTSTYQEIAGNDREVGQYESHQDYTLPGLYRVENGIDVFDSKFNIVSPGADPRTYFSYARTEERFSSLWPEIESLLFGREPGPDIRGVLEDRQKPIILSMARMDRIKNLSGLAELYGRSSRLRSLANLVIIGGHVDVQNSMDAEEREEIRRMHEIMDHYQLDGQMRWVGSQLDKTVVGELYRVVADGRGVFVQPALFEAFGLTVIEAMSSGLPVFATRHGGPLEIIEDGVSGFHIDPNDPEATAEKLADFLEAARERPKYWEEISDAALARVSERYTWERYAERLMTIARCFGFWRFVLSRESQVMERYLQMFRHLQWRPLAHAVPME

SEQ ID NO: 1047 - protein, 793 aa, Artificial Sequence
  engineered sucrose synthase encoded in plasmid pA32926
MIEELRQQLLDSPRSWRAFLRHLVASQRDSWLHTDLQRACKTFREQPPEGYPEDIGWLADFVAHTQEAIFRDPWMVFAWRLRPGVWEYVRIHVEQLAVEELSTDEYLQAKEQLVGLGAEGEAVLTVDFEDFRPVSQRLKDESTIGDGLTHLNRHLAGRIWTDLAAGRSQILEFLGLHRLDNQNLMLSNGNTDFDSLRQTVQYLGTLPRETPWAEFREDMRRRGFEPGWGNTAGRVRETMRLLMDLLDSPSPAALESFLDRIPMISNVLILSIHGWFAQDKVLGRPDTGGQVVYILDQARALEREMRNRLRQQGVDVEPRILIVTRLIPESDGTTCDQRLEPVHGAENVQILRIPFRYEDGRIHPHWISRFKVWPYLERWVSDVEREIKAELGSRPDLIIGNYSDGNLVATLLSEKWGITQCNIAHALEKSKYLYSDLHWPDHEQDHHFACQFTADLIAMNAADIIVTSTYQEIAGNDREVGQYESHQDYTLPGLYRVENGIDVFDSKFNIVSPGADPRTYFSYARTEERFSSLWPEIESLLFGREPGPDIRGVLEDRQKPIILSMARMDRIKNLSGLAELYGRSSRLRSLANLVIIGGHVDVQNSMDAEEREEIRRMHEIMDHYQLDGQMRWVGSQLDKTVVGELYRVVADGRGVFVQPALFEAFGLTVIEAMSSGLPVFATRHGGPLEIIEDGVSGFHIDPNDPEATAEKLADFLEAARERPKYWEEISDAALARVSERYTWERYAERLMTIARCFGFWRFVLSRESQVMERYLQMFRHLQWRPLAHAVPME

SEQ ID NO: 1048 - protein, 793 aa, Artificial Sequence
  engineered sucrose synthase encoded in plasmid pA32934
MIEELRQQLLDSPRSWRAFLRHLVASQRDSWLHTDLQRACKTFREQPPEGYPEDIGWLADFVAHTQEAIFRDPWMVFAWRLRPGVWEYVRIHVEQLAVEELSTDEYLQAKEQLVGLGAEGEAVWTIDLEDYRPVSQRLKDESTIGDGLTHLNRHLAGRIWTDLAAGRSQILEFLGLHRLDNQNLMLSNGNTDFDSLRQTVQYLGTLPRETPWAEFREDMRRRGFEPGWGNTAGRVRETMRLLMDLLDSPSPAALESFLDRIPMISNVLIVSIHGWFAQDKVLGRPDTGGQVVYILDQARALEREMRNRLRQQGVDVEPRILIATRLIPESDGTTCDQRLEPVHGAENVQILRVPFRYEDGRIHPHWISRFKVWPYLERYASDLEREVKAELGSRPDLIIGNYSDGNLVATLLSEKLGVTQCNIAHALEKSKYLYSDLHWPDHEQDHHFACQFTADWIAMNAADIIVTSTYQEIAGNDREVGQYESHQDYTLPGLYRVENGVDVFDSKFNIVSPGADPRTYFSYARTEERFSSLWPEIESLLFGREPGPDIRGVLEDRQKPIILSMARMDRIKNLSGLAELYGRSSRLRSLANLVIIGGHVDVQNSMDAEEREEIRRMHEIMDHYQLDGQMRWVGSQLDKTVVGELYRVVADGRGVFVQPALFEAFGLTVIEAMSSGLPVFATRHGGPLEIIEDGVSGFHIDPNDPEATAEKLADFLEAARERPKYWEEISDAALARVSERYTWERYAERLMTIARCFGFWRFVLSRESQVMERYLQMIRHLQWRPLAHAVPME

SEQ ID NO: 1049 - protein, 793 aa, Artificial Sequence
  engineered sucrose synthase encoded in plasmid pA32632
MIEVLRQQLLDNPNSWRAFLRHLVASGRDLWLHHDLQDACETFREQPPEGYPEDIGWFADFIAHCQEAIFRDPWMVFAWRLRPGRWEYVRIHVEQLAVEELSTDEYLQFKEELVGGNHEGEAVLTVDFEDFRPSSQRLKDESTIGNGLQHLNRHLAGRIWTDLAAGDSKILEFLGLHRLDGQQLMLSDRITDFDSLRQTVQYLGTLPEETPWAEFREDMRRLGFEPGWGDTAGRVRETMRLLMDLLDSPSPAALEKFLGRIPMISNVLIVSIHGWFAQDNVLGRPDTGGQVVYILDQARALEREMRERLRQQGVDVEPRILIATRLIPESDGTTCDQRLEPVHGTENVWILRVPFRYEDGRIHPHWISRFKVWPYLERYARDLEREVLAELGGRPDLIIGNYSDGNLVATILSEKLGVTQCNIAHALEKSKYPGSDLYWPDYEQKYHFACQFTADLIAMNAADIIVTSTYQEIAGNDREVGQYESHQDYTLPGLYRVVNGIDVFDPKFNIVSPGADPSIYFSYTRTEERFSSLHPEIEKLLFGREPGPDIRGVLEDPDKPIILSVARMDRIKNLTGLAELYGRSARLRELANLVIIGGHVDVQKSTDAEEREEIRRMHEIMDRYQLDGQMRWVGSHLDKRRVGELYRYVADGRGVFVQPALFEAFGLTVIEAMSSGLPVFATRHGGPLEIIEDGVSGFHIDPNDPDAVAEKLADFLEHAKEDPKYWEKISQAALQRVEERYTWERYAERLMTIARCYGFWRFVLSRESQVMRRYLQMFRHLQWRPLAHAVPME

SEQ ID NO: 1050 - protein, 793 aa, Artificial Sequence
  engineered sucrose synthase encoded in plasmid pA32634
MIEVLRQQLLDNPNSWRAFLRHLVASGRDLWLHHDLQDACETFREQPPEGYPEDIGAFADFIAHCQEAIFRDPWMVFAWRLRPGRWEYVRIHVEQLAVEELSVDEYLQFKEELVGGNAEGEAVLTVDFEDFRPSSQRLKDESTIGNGLQHLNRHLAGRIWTDLAAGDSKLLEFLGLHRLDGQQLMLSDRITDFDSLRQAVQYLGTLPEDTPWSEFQHEMQRLGFEPGWGDTAGRVRETMRLLMDLLDSPSPAALEKFLGRIPMISNVLIVSPHGWFAQDNVLGRPDTGGQVVYILDQARALEREMRKRLREQGVDVEPRILIATRLIPESDGTTCDQRLEPVSGTENVWILRVPFRYEDGRIHPHWISRFKVWPYLERFARDLEREVLAELGGRPDLIIGNYSDGNLVATILSEKLGVTQCNIAHALEKSKYPGSDLYWRKYEEKYHFSCQFTADLIAMNAADIIVTSTYQEIAGNDHEVGQYESHQDYTLPGLYRVVNGIDVFDPKFNIVSPGADPSIYFSYSRTEERFSSLHPEIERLLFGREPGPDIRGVLEDPDKPIILSVARMDRIKNLTGLAELYGRSSRLRELANLVIIGGHVDVNKSSDREEREEIRRMHEIMDRYQLDGQMRWVGSHLDKRRVGELYRYVADTRGVFVQPALFEAFGLTVIEAMSSGLPVFATRHGGPLEIIEDGVSGFHIDPNDPDAVAEKLADFLEHAKEDPKYWEKISQAALQRVEERYTWERYAERLMTIARCYGFWRFVSKRERQVMRRYLQMFRHLQWRPLAHAVPME

SEQ ID NO: 1051 - protein, 793 aa, Artificial Sequence
  engineered sucrose synthase encoded in plasmid pA32638
MIEVLRQQLSDHPNDWHAFLRHLVASQRDIWLHTDLQDACKTFREQPPEGYPEGIGALADFIAHCQEAIFRDPWMVFAWRLRPGVWEYVRIHVEQLAVEELSTDEYLQFKEQLVGGGAEGEAVLEVDFEDFRPGFQRLKDESTIGNGLTHLNRHLAGRLWTDLAGGRSRLLEFLGVHRLDGQNLMLSNRNTDFDSLRQVVQYLGTLPRETPWAEFREDMRRMGFEPGWGDTAGRVRETMRLLMDLLDSPSPAALEKFLARIPMISNVLIVSIHGWFAQDNVLGRPDTGGQVVYILDQARALEREMRNRLRQQGVDVEPRILIATRLIPDSDGTTCDQRLEPVHGAENVWILRVPFRYEDGRIHPHWISRFKVWPYLERYARDLEREVKAELGSRPDLIIGNYSDGNLVATILSEKLGVTQCNIAHALEKSKYPHSDLHWPKYEQDYHFACQFTADLIAMNAADIIVTSTYQEIAGNDREVGQYESHQAFTLPGLYRVVNGIDVFDPKFNIVSPGADPSIYFSYSRKEERLSSLHPEIESLLFGREPGPDIRGVLEDPQKPIILSVARMDRIKNLTGLAEWYGRNPRLRELANLVIIGGHVDVQKSSDAEEREEIRRMHEIMDRYQLDGQMRWIGSHLDKRVVGELYRVVADGRGVFVQPALFEAFGLTVIEAMTSGLPVFATRHGGPLEIIEHGVSGFHIDPNDPDAVAEKLADFLEAAREDPKYWEEISQAALARVSERYTWERYAERLMTIARCYGFWRFVSSRESQVTERYLQMFRHLQWRPLAHAVPME

SEQ ID NO: 1052 - protein, 793 aa, Artificial Sequence
  engineered sucrose synthase encoded in plasmid pA32646
MIEVLRQQLLSHPNSWRAFLRHLVASQRGIWLHTDLQDACKTFREQPPEGYPEDIGWLADFIKHCQEAIFRDPWMVFAWRLRPGVWEYVRIHVEQLAVEELSTDEYLQFKEQLVGLGAEGEAVLTVDFEDFRPGFQRLKDESTIGDGLTHLNRHLAGRIWTDLGAGRSAILEFLGLHRLDGQQLMLSDRNTDFDSLRQTLQYLGTLPRETPWAEFREDMRRRGFEPGWGDTAGRVRETMRLLMDLLDSPSPAALEKFLDRIPMISNVLIVSIHGWFAQDKVLGYPDTGGQVVYILDQARALEREMRNRLRQQGVDVEPRILIATRLIPESDGTTCDQRLEPVHGAENVWILRVPFRYEDGRIHPHWISRFKVWPYLERYARDLEREVLAELGGRPDLIIGNYSDGNLVATILSEKLGVTQCNIAHALEKSKYPGSDLYWPKYEQDYHFACQFTADLIAMNAADIIVTSTYQEIAGNDREVGQYESHQDYTLPGLYRVINGIDVFDPRFNIVSPGADPSTYFSYARHERRFSSLHPEIESLLFGREPGPDIRGVLKDPDKPIILSVARMDRIKNLSGLAEWYGRSPRLRELANLVIIGGHVDVQKSSDGEEREEIRRMHEIMDRYQLDGQMRWVGSHLDKRVVGELYRVVADKRGVFVQPALFEAFGLTVIEAMSSGLPVFATRHGGPLEIIEHGVSGFHIDPNDPDAVAEKLADFLEAARERPKYWEKISQAALARVEERYTWERYAERLMTIARCFGFWRFVLSRERQVTRRYLQMFRHLQWRPLAHAVPME

SEQ ID NO: 1053 - protein, 793 aa, Artificial Sequence
  engineered sucrose synthase encoded in plasmid pA32653
MIEVLRQQLQDHPRSWRAFLRHLVASGRGLWLHHDLQDACETFREQPPEGYPEDIGWLADFIQHCQEAIFRDPWMYFAWRLRPGVWEYVRIHVEQLTVEELSVSEYLQFKEQLVDGESEGNAVLTVDFEDFRPTSQRLKDESTIGNGLTHLNRHLAGRMWQDLGKGRSAILEFLGLHRLDGQHLMLSDGNRDFDSLRQAVQYLGKLPEDTPWSEFEEDLRRMGFEPGWGDTAGRVRETMRLLMDLLDSPSPAALEKFLGRIPMISNVLIVSIHGWFAQDNVLGRPDTGGQVVYILDQARALEREMRQRLREQGVDVEPRILIATRLIPESKGTTCDQRLEPVSGAENVWILRVPFRYEDGRIHPHWISRFKVWPYLERFAEDLEREVKAELGGRPDLIIGNYSDGGLVATLLSEKLGVTQCNIAHALEKTKYPGSDLYWKKYEQKYHFACQFTADLIAMNAADIIITSTYQEIAGNDREVGQYESHQAYTMPGLYRVVNGIDVFDSKFNIVSPGADPSIYFPYSRTEERFTSLHPEIEKLLFGREPGPPHRGVLEDPDKPIILSVARMDRIKNLTGLAELYGRSARLRELANLVIIGGHVDVEKSMDGEEREEIRRMHEIMDKYNLDGQMRWVGSHLNKVRVGELYRVVADRRGVFVQPALFEAFGLTVIEAMSSGLPVFATRHGGPAEIIEDGVSGFHIDPNDPEQVAEKLADFLEAAREDPTYWEKISQAALQRVEERYTWERYAERLMTIARCFGFWKFVSSRERQVMRRYLQMFRHLQWRPLAHAVPME

SEQ ID NO: 1054 - protein, 793 aa, Artificial Sequence
  engineered sucrose synthase encoded in plasmid pA32722
MIEVLRQQLLDSPRSWRAFLRHLVASQRDSWLHTDLQHACKTFREQPPEGYPEDIGWLADFIAHCQEAIFRDPWIVFAWRLRPGVWEYVRIHVEQLAVEELSTDEYLQAKEQLVGLGAEGEAVLTVDFEDFRPVSQRLKDESTIGDGLTHLNRHLAGRIWTDLAAGRSAILEFLGLHRLDNQNLMLSNGNTDFDSLRQTVQYLGTLPRETPWAEFREDMRRRGFEPGWGNTAGRVRETMRLLMDLLDSPSPAALESFLDRIPMISNVLIVSPHGWFAQDKVLGRPDTGGQVVYILDQARALEREMRNRLRQQGVDVEPRILIATRLIPESDGTTCDQRLEPVHGAENVQILRVPFRYEDGRIHPHWISRFKVWPYLERYARDLEREVKAELGSRPDLIIGNYSDGGLVATILSEKLGVTQCNIAHALEKSKYPGSDLHWPLYEQDHHFACQFTADLIAMNAADFIVTSTYQEIAGNDREVGQYESHQDYTLPGLYRVENGIDVFDSKFNIVSPGADPSTYFSYARHEERFSSLWPEIESLLFGREPGPDIRGVLEDPQKPIIFSVARMDRIKNLSGLAELYGRSARLRSLANLVIIGGHVDVQASMDAEEREEIRRMHEIMDRYQLDGQMRWVGSHLDKRVVGELYRVVADGRGVFVQPALFEAFGLTVIEAMSSGLPVFATRHGGPLEIIEDGVSGFHIDPNDPEAVAEKLADFLEAARERPKYWEEISQAALARVSERYTWERYAERLMTLARIYGFWRFVLSRESQVMERYLQMFRHLQWRPLAHAVPME

SEQ ID NO: 1055 - protein, 793 aa, Artificial Sequence
  engineered sucrose synthase encoded in plasmid pA32724
MIEVLRQQLLDSPRSWRAFLRHLVASQRDSWLHTDLQHACKTFREQPPEGYPEDIGWLADFIAHCQEAIFRDPWIVFAWRLRPGVWEYVRIHVEQLAVEELSTDEYLQAKEQLVGLGAEGEAVLTVDFEDFRPVSQRLKDESTIGDGLTHLNRHLAGRIWTDLAAGRSAILEFLGLHRLDNQNLMLSNGNTDFDSLRQTVQYLGTLPRETPWAEFREDMRRRGFEPGWGNTAGRVRETMRLLMDLLDSPSPAALESFLDRIPMISNVLILSPHGWFAQDKVLGRPDTGGQVVYILDQARALEREMRNRLRQQGVDVEPRILIVTRLIPESDGTTCDQRLEPVHGAENVQILRVPFRYEDGRIHPHWISRFKIWPYLERYARDVEREVKAELGSRPDLIIGNYSDGGLVASILSEKLGVTQCNIAHALEKSKYPGSDLHWPLYEQDHHFACQFTADLIAMNAADFIITSTYQEIAGNDREVGQYESHQDYTLPGLYRVENGIDVFDSKFNIVSPGADPSTYFSYARHEERFSSLWPEIESLLFGREPGPDIRGVLEDPQKPILFSVARMDRIKNLSGLAELYGRSARLRSLANLVIIGGHVDVQASMDAEEREEIRRMHEIMDRYQLDGQMRWVGSHLDKRVVGELYRVVADGRGVFVQPALFEAFGLTVIEAMSSGLPVFATRHGGPLEIIEDGVSGFHIDPNDPEAVAEKLADFLEAARERPKYWEEISQAALARVSERYTWERYAERLMTLARIYGFWRFVLSRESQVMERYLQMFRHLQWRPLAHAVPME

SEQ ID NO: 1056 - protein, 793 aa, Artificial Sequence
  engineered sucrose synthase encoded in plasmid pA32727
MIEVLRQQLLDSPRSWRAFLRHLVASQRDSWLHTDLQHACKTFREQPPEGYPEDIGWLADFIAHCQEAIFRDPWIVFAWRLRPGVWEYVRIHVEQLAVEELSTDEYLQAKEQLVGLGAEGEAVLTVDFEDFRPVSQRLKDESTIGDGLTHLNRHLAGRIWTDLAAGRSAILEFLGLHRLDNQNLMLSNGNTDFDSLRQTVQYLGTLPRETPWAEFREDMRRRGFEPGWGNTAGRVRETMRLLMDLLDSPSPAALESFLDRIPMISNVLIVSPHGWFAQDKVLGRPDTGGQVVYILDQARALEREMRNRLRQQGVDVEPRILIVTRLIPESDGTTCDQRLEPVHGAENVQILRVPFRYEDGRIHPHWISRFKVWPYLERYARDLEREVKAELGSRPDLIIGNYSDGGLVATILSEKLGVTQCNIAHALEKSKYPGSDLHWPLYEQDHHFSCQFTADLIAMNAADFIVTSTYQEIAGNDREVGQYESHQDYTLPGLYRVENGIDVFDSKFNIVSPGADPSTYFSYARHEERFSSLWPEIESLLFGREPGPDIRGVLEDPQKPILFSVARMDRIKNLSGLAELYGRSARLRSLANLVVIGGHVDVQASMDAEEREEIRRMHEIMDRYQLDGQVRWIGSHLDKRVVGELYRVVADGRGVFVQPALFEAFGLTVIEAMSSGLPVFATRHGGPLEIIEDGVSGFHIDPNDPEAVAEKLADFLEAARERPKYWEEISQAALARVSERYTWERYAERLMTLARIYGFWRFVLSRESQVMERYLQMFRHLQWRPLAHAVPME

SEQ ID NO: 1057 - protein, 793 aa, Artificial Sequence
  engineered sucrose synthase encoded in plasmid pA32729
MIEVLRQQLLDSPRSWRAFLRHLVASQRDSWLHTDLQHACKTFREQPPEGYPEDIGWLADFIAHCQEAIFRDPWVVFAWRLRPGVWEYVRIHVEQLAVEELSTDEYLQAKEQLVGLGAEGEAVLTVDFEDFRPVSQRLKDESTIGDGLTHLNRHLAGRIWTDLAAGRSAILEFLGLHRLDNQNLMLSNGNTDFDSLRQTVQYLGTLPRETPWAEFREDMRRRGFEPGWGNTAGRVRETMRLLMDLLDSPSPAALESFLDRIPMISNILIVSIHGWFAQDKVLGRPDTGGQVVYILDQVRALEREMRNRLRQQGVDVEPRILIVTRLIPESDGTTCDQRLEPVHGAENVQILRVPFRYEDGRIHPHWISRFKVWPYLERFARDAEREVKAELGSRPDLIIGNYSDGNLVASILSEKLGVTQCNIAHALEKSKYPGSDLHWPLYEQDHHFACQFTADLIAMNAADFIITSTYQEIAGNDREVGQYESHQDYTLPGLYRVENGIDVFDSKFNIVSPGADPSTYFSYARHEERFSSLWPEIESLLFGREPGPDIRGVLEDPQKPIIFSVARLDRIKNLSGLAELFGRSARLRSLANLVIIGGHVDVQASMDAEEREEIRRMHEIMDRYQLDGQMRWLGSHLDKRVVGELYRVVADGRGVFVQPALFEAFGLTVIEAMSSGLPVFATRHGGPLEIIEDGVSGFHIDPNDPEAVAEKLADFLEAARERPKYWEEISQAALARVSERYTWERYAERLMTLARIYGFWRFVLSRESQVMERYLQMFRHLQWRPLAHAVPME

SEQ ID NO: 1058 - protein, 793 aa, Artificial Sequence
  engineered sucrose synthase encoded in plasmid pA32735
MIEVLRQQLLDSPRSWRAFLRHLVASQRDSWLHTDLQHACKTFREQPPEGYPEDIGWLADFIAHCQEAIFRDPWIYFAWRLRPGVWEYVRIHVEQLAVEELSTDEYLQAKEQLVGLGAEGEAVLTVDFEDFRPVSQRLKDESTIGDGLTHLNRHLAGRIWTDLAAGRSAILEFLGLHRLDNQNLMLSNGNTDFDSLRQTVQYLGTLPRETPWAEFREDMRRRGFEPGWGNTAGRVRETMRLLMDLLDSPSPAALESFLDRIPMISNVLIVSPHGWFAQDKVLGRPDTGGQVVYILDQARALEREMRNRLRQQGVDVEPRILIATRLIPESDGTTCDQRLEPVHGAENVQILRVPFRYEDGRIHPHWISRFKIWPYLERYARDLEREVKAELGSRPDLIIGNYSDGNLVATILSEKLGVTQCNIAHALEKSKYPGSDLHWPLYEQDHHFSCQFTADLIAMNAADFIVTSTYQEIAGNDREVGQYESYQDYTLPGLYRVENGIDVFDSKFNIVSPGADPSTYFSYARHEERFSSLWPEIESLLFGREPGPDIRGVLEDPQKPILFSVARMDRIKNLSGLAELYGRSARLRSLANLVIIGGHVDVQASMDAEEREEIRRMHELMDRYQLDGQMRWIGSHLDKRVVGELYRVVADGRGVFVQPALFEAFGLTVIEAMSSGLPTFATRHGGPLEIIEDGVSGFHIDPNDPEAVAEKLADFLEAARERPKYWEEISQAALARVSERYTWERYAERLMTLARIYGFWRFVLSRESQVMERYLQMFRHLQWRPLAHAVPME

SEQ ID NO: 1059 - protein, 793 aa, Artificial Sequence
  engineered sucrose synthase encoded in plasmid pA32738
MRERLEDTLSAHRNELLSLLSRYVAQGKGILQPHHLLDELEAVIEEDEEKSKLKDGPFGEVLKSTQEAIVLPPWVALAVRPRPGVWEYVRVNVDELSVEELSVSEYLRFKEELVDGSSEGNAVLEVDFEDFNASFQRPKDESTIGNGVQHLNRHLSGRLWRDLESGMEPLLDFLRAHNYKGHNLMLNDRIQSFDRLRKAEQYLGKLPPDTPYSEFEHKFQELGLERGWGDTAERVLEMIRLLMDILDSPSPSTLEKFLGRIPMVFNVVILSPHGYFGQANVLGLPDTGGQVVYILDQVRALENEMLLRIKQQGLDITPRILIVTRLIPDAKGTTCGQRLEKVSGTEHSHILRVPFRTEKGIVRPKWISRFDVWPYLERFAEDAASEIAAELQGKPDLIIGNYSDGNLVASLLAHKLGVTQCTIAHALEKTKYPDSDIYWKKFEEKYHFSCQFTADLIAMNHADFIITSTYQEIAGSDDTVGQYESHTAFTLPGLYRVVHGIDVFDPKFNIVSPGADMSIYFPYTEKEKRLTSLHPSIEELLYSPEQNDEHIGVLKDRSKPIIFSVARLDRVKNITGLVEWYGKNTKLRELVNLVVVAGDIDVKKSKDREEIAEIKKMHDLIKTYNLNGQFRWISSHMNKVRVGELYRYIADTKGAFVQPAFYEAFGLTVVEAMTCGLPTFATCHGGPAEIIEHGVSGFHIDPYHGDKAAELLADFFEKCKADPSHWDKISQGGLQRIYEKYTWKIYSERLMTLAGVYGFWKYVSKRERQVTRRYLQMFRHLQYRPLAHSVPLE

SEQ ID NO: 1060 - protein, 793 aa, Artificial Sequence
  engineered sucrose synthase encoded in plasmid pA32742
MRERLDDTLSAHRNELVSLLSRYVAQGKGILQPHQLLDELEAVIEEDGELEKLKDGPFGEVLRSTQEAIVLPPWVALAVRPRPGVWEYVRVNVYELSVEELTVSEYLKFKEELVDGRSEGNAVLEVDFEDFNASFQRPKDESTIGNGVQHLNRHLSGRLWRDLESGMEPLLDFLRAHKYKGHTMMLNDRIQSFDSLRKAEQYLGKLPPDTPYSEFEHKLQELGLERGWGDTAERVLEMIRLLMDLLDSPSPSTLEKFLGRIPMVFNVVILSPHGYFAQANVLGLPDTGGQVVYILDQVRALENEMLLRIKQQGLDITPRILIVTRLIPDAKGTTCNQRLEKVSGTEHSHILRVPFRTEKGILRPKWISRFDVWPYLERFAEDVASEISAELQGKPDLIIGNYSDGNLVASLLAHKLGVTQCTIAHALEKTKYPDSDIYWKKFEEKYHFSCQFTADLIAMNHADFIITSTYQEIAGSDDTVGQYESHTAFTLPGLYRVVHGIDVFDPKFNIVSPGADMSIYFPYTEKEKRLTSLHPEIEELLYSPEQNDEHIGVLKDRSKPIIFSVARLDRVKNITGLVEWYGKNAKLRELVNLVVVAGYIDVKKSKDREEQAEIEKMHELIKKYKLNGQFRWISSHMNKVRVGELYRYIADTKGAFVQPAFYEAFGLTVVEAMTCGLPTFATCHGGPAEIIEDGVSGFHIDPYHGDQAAELLVDFFEKCKKDPSYWEKISQGGLKRIYEKYTWKIYSERLMTLAGVYGFWKYVSKRERQVTRRYLQMFRHLQYRPLAHSVPLE

SEQ ID NO: 1061 - protein, 793 aa, Artificial Sequence
  engineered sucrose synthase encoded in plasmid pA32743
MRERVEDTLSAHRNELVSLLSRYVAQGKGILQPHQLLDELEAVIEEDEARQKLRDGPFGEVLRSAQEAIVLPPWVALAVRPRPGVWEYVRVNVDELSVEQLSVSEYLRFKEELVDGSAEGNAVLEVDFEDFNASFQRPKDESTIGNGVQHLNRHLSGRLWRDLESGMQPLLDFLRAHKYKGHNLMLNDRIQSFDRLRKAEQYLGKLPPDTPYSEFEHKLQELGLEKGWGDTAERVLEMIRLLMDLLDSPSPSTLEKFLGRIPMVFNVVILSPHGYFGQANVLGLPDTGGQVVYILDQVRALENEMLLRIKQQGLDITPRILIVTRLIPDAKGTTCGQRLEKVSGTEHSHILRVPFRTEKGIVRPKWISRFDVWPYLERFAEDAASEIAAELQGKPDLIIGNYSDGNLVASLLAHKLGVTQCTIAHALEKTKYPDSDIYWKKFEEKYHFSCQFTADLIAMNHADFIITSTYQEIAGSDDTVGQYESHTAFTLPGLYRVVHGIDVFDPKFNIVSPGADMSIYFPYTEKEKRLTSLHPEIEELLYSPEQNDEHIGVLKDRSKPIIFSVARLDRVKNITGLVEWYGKNARLRELVNLVVVAGDIDPKKSKDREEIAEIEKMHELIEKYNLNGQFRWISSHMNKARVGELYRYIADTKGAFVQPAFYEAFGLTVVEAMTCGLPTFATCHGGPAEIIVHGVSGFHIDPYHGDKAAELLVDFFEKCKEDPSHWDKISQGGLQRIYEKYTWKIYSERLMTLAGVYGFWKYVSKRERQVTRRYLQMFRHLQFRPLAHTVPLE

SEQ ID NO: 1062 - protein, 793 aa, Artificial Sequence
  engineered sucrose synthase encoded in plasmid pA32746
MRERVEDTLSAHRNELVSLLSRYVAKGKGILQPHQLLDELEAVIEEDDEKEKLKDGPFGEVLRSAQEAIVVPPWVALAVRPRPGVWEYVRVNVEELSVEQLTVSEYLRFKEELVDGSSEGNAVLEVDFEDFNASFQRPKDESTIGNGVQHLNRHLSGRLWRDLESGLEPLLDFLRAHNYKGHTMMLNDRIQSFDRLRKAEQYLGKLPPDTPYSEFEHKLQELGLERGWGDTAERVLEMIRLLMDLLDSPSPSTLEKFLGRIPMVFNVVILSPHGYFGQANVLGYPDTGGQVVYILDQVRALENEMLLRIKQQGLDITPRILIVTRLIPDAKGTTCNQRLEKVSGTEHSHILRVPFRTEKGIVRPKWISRFDVWPYLERFAEDVANEIAAELQGKPDLIIGNYSDGNLVASLLAHKLGVTQCTIAHALEKTKYPDSDIYWKKFEEKYHFSCQFTADLIAMNHADFIITSTYQEIAGSDDTVGQYESHTAFTLPGLYRVVHGIDVFDPKFNIVSPGADMSIYFPYTEKEKRLTALHPEIEELLYSPEQNDEHIGVLKDRSKPIIFSVARLDRVKNITGLVEWYGKNKRLRELVNLVVVAGYIDVKKSKDREEQAEIKKMHGLIKTYNLNGQFRWISAHTNKVRVGELYRYIADTRGAFVQPALYEAFGLTVVEAMTCGLPTFATCHGGPAEIIVHGVSGFHIDPYHGDQAAELLVDFFEKCKEDPSYWDKISQGGLQRIYEKYTWKIYSERLMTLAGVYGFWKYVSKRERQVTRRYLQMFRHLQFRPLAHSVPLE

SEQ ID NO: 1063 - protein, 793 aa, Artificial Sequence
  engineered sucrose synthase encoded in plasmid pA32747
MIEELREFLAEHRDAVYLLLRRYLGLGRPFLLRSDLWDEFEAFCEEQGEEEGLLDSPLARLIAAAQEAVLDAPWIYLAVRPRVARWEYLRIHLETLEVEEISVSEFLAFKERLVNGDPEGEAVLEVDLGDFNREFQKLKDESTIGRGVEHLNRHLSGRLWQDLGKGDQRLLDFLRVHQYRGQQLMLNDRIRDFDALRRALQYLGRQPPEAPWEEVAHELQELGFEPGWGRTAARMRDTLRLLMDILDSPSPETLERFLGRIPMIFSIAILSPHGYFGQANVLGLPDTGGQVVYILDQVRALEREMRRRLAEQGLDIEPQILVVTRLIPEAGGTTCDQRLEPIVGTENARILRVPFRNEDGEVVPHWISRFEVWPYLERFALDVERELLAELGGRPDLIIGNYSDGNLVATLLSQKLGVTQCNIAHALEKTKYLYSDLYWRDNEEQYHFSCQFTADLIAMNAADFIITSTYQEIAGTDDSVGQYESYSAFTMPGLYRVVNGIDVFDPKFNIVSPGADAEVYFPYTETERRLTGLHPEIEELVFGGEERPDARGVLADPDKPLLFTVARLDRIKNITGLVEWYGRSERLRELANLLVIAGHVDPAQSDDREEREQIARMHELMDRHGLDGQVRWLGVHLDKNLVGELYRYVADRRGAFVQPALFEAFGLTVIEAMSSGLPTFATCYGGPLEIIEHGVSGFHIDPNHGEEAAELIADFFERCAADPGYWERISQGALERVRSRYTWELYAERMMTLSRIYGFWKYVTNRERQVTRRYLQMFRHLQFRPLAHAVPLE

SEQ ID NO: 1064 - protein, 793 aa, Artificial Sequence
  engineered sucrose synthase encoded in plasmid pA32749
MIEELREFLAEHRDALYLLLRRYLALGRPFLLRSDLWDEFERFCEEDGEETELADSPLGRIIAATQEAAIDAPWIYLAVRPRVARWEYLRIHLETLEVEEISVSEFLAFKERLVNGAPEGDAVLEVDLGDFNREFQKLKDESTIGRGVEHLNRHLSGRLWQDLGKGDQRLLEFLRVHQYRGQQLMLNDRIRDFDGLRRALQYLGRQPPDAPWEEVAHELQRLGFEPGWGRTAARMRETLRLLMDILDSPSPETLERFLGRIPMIFSIAILSPHGYFGQANVLGRPDTGGQVVYILDQVRALEREMRRRLAEQGLDIEPQILVVTRLIPEAGGTTCDQRLEPIAGTENARILRVPFRNEDGEVVPQWISRFEVWPYLERFALDVERELLAELGGRPDLIIGNYSDGNLVATLLAQKLGVTQCNIAHALEKTKYLYSDLYWRDNEEQYHFSCQFTADLIAMNAADFIITSTYQEIAGTDDSVGQYESYSAFTLPGLYRVVNGIDVFDPKFNIVSPGADAEVYFPYTEQERRLTGLHPEIEELLFGDEPRPDARGVLEDRDKPLLFTVARLDRIKNITGLVEWYGRSPRLRELANLLVVAGHVDPARSSDREEREQIERMHELMDEHGLDGQVRWLGLHLDKNLVGELYRYVADRRGAFVQPALFEAFGLTVIEAMSSGLPTFATCYGGPLEIIEHGVSGFHIDPNHGEEAAEIMADFFERCAAEPGYWERISRGALARVESRYTWKLYAERMMTLSRIYGFWKYVTNRERQVTRRYLQMFRHLQFRPLAHAVPLE

SEQ ID NO: 1065 - protein, 793 aa, Artificial Sequence
  engineered sucrose synthase encoded in plasmid pA32751
MIERLDEFLAEHRDQVYLLLRRYVGLGRPFLLRSDLWDEFLAFCEEDDEEEELLDSPLARAIRAAQEAVVDAPWIYLAVRPRVARWRYLRFHVETLEVEEISVSEFLAFKERLVNGDPEGPAVLEVDLGDFNREFQKLKDESTIGRGVEHLNRHLSGRLWQDLGKGDQRLLDFLRVHQYRGQQLMLNDRIRDFDGLRRAEQYLGRQPADAPWEEVAHRLQELGFEPGWGRTAARMRDTLRLLMDILDSPSPRTLERFLGRIPMIFSLAILSPHGYFGQANVLGRPDTGGQVVYILDQVRALEREMRRRLHEQGLDIEPQILVVTRLIPEAEGTTCDQRLEPIVGTENARILRVPFRNEDGEVLPHWISRFEVWPYLERFALDVEREILAELGGRPDLIIGNYSDGNLVATLLSQKLGVTQCNIAHALEKTKYLYSDLYWRDNEEQYHFSCQFTADLIAMNAADFIITSTYQEIAGTDDSVGQYESYSAFTMPGLYRVVNGIDVFDPKFNIVSPGADAEIYFPYTETERRLTGLHPEIEELIFGGEERPDARGVLADRDKPLLFTVARLDRIKNITGLVEWYGRSPRLRELANLLVVAGHVDPAKSSDREEREQIGRMHELMDRHGLDGQVRWLGVHLDKNLVGELYRYVADRRGAFVQPALFEAFGLTVIEAMSSGLPTFATRYGGPLEIIEHGVSGFHIDPNHGEEAAELIADFFERCAEDPGYWERISRGALERVRARYTWELYAERMMTLSRIYGFWKYVTNRERQVTRRYLQMFRHLQFRPLAHAVPLE

SEQ ID NO: 1066 - protein, 793 aa, Artificial Sequence
  engineered sucrose synthase encoded in plasmid pA32752
MIEALREFLSEHRDAVYLLLRRYLGLGRPFLLRSDLWDEFAAFCAEDGEEEELLDSPLARAIRAAQEAVLDAPWIYLALRPRVARWEYLRIHLETLDVEEISVSEFLAFKERLVTGDGEGEAVLEVDLGDFNREFQKLKDESTIGRGVEHLNRHLSGRLWQDLGKGDQRLLEFLRVHQYRGQQLMLNDRITDFDALRRALQYLGRQPPDAPWEEVAHRLQELGFEPGWGRTAARMRETLRLLMDILDSPSPATLERFLGRIPMIFSIAILSPHGYFGQDNVLGRPDTGGQVVYILDQVRALEREMRQRLAEQGLDIEPRILVVTRLIPEAEGTTCDQRLEPIVGTENARILRVPFRNESGEVVPHWISRFEVWPYLERFALDVERELLAELGGRPDLIIGNYSDGNLVATLLAQKLGVTQCNIAHALEKTKYLYSDLYWRDNEEQYHFACQFTADLIAMNAADFIITSTYQEIAGTDDSVGQYESYAAFTMPGLYRVVNGIDVFDPKFNIVSPGADAEVYFPYTETERRLTGLHPEIEELLFGGEPRPDARGVLADRDKPLLFTVARLDRIKNITGLVEWYGRSERLRELANLLVIAGHVDPERSDDREERAQIQRMHQLMDEHGLDGQVRWLGVHLDKNLVGELYRYIADRRGAFVQPALFEAFGLTVIEAMSSGLPTFATCYGGPLEIIEHGVSGFHIDPNHGEAAAELIADFFERCAADPGYWERISQGALARVRARYTWELYAERMMTLSRIYGFWKYVTNRERQVTRRYLQMFRHLQYRPLAHAVPLE

SEQ ID NO: 1067 - protein, 793 aa, Artificial Sequence
  engineered sucrose synthase encoded in plasmid pA32757
MIEELEQYLADHRDALYLLLRRYLGLGRPFLLRSDLWDEFQAFCEETGEEEGLADSPLARLIRHAQEAVLDAPWIYLAVRPRVARWEYLRIHVETLEVEEISVSEYLAFKERLVGGDAEGEAVLEVDLGDFNREFQKLKDESTIGRGVEHLNRHLSGRLWQDLGKGDQRLLDFLRVHQYRGQQLMLNDRIRDFDALRQALQYLGRQPPDAPWEEVAHELRRLGFEPGWGRTAARMRDTLRLLMDILDSPSPATLERFLGRIPMIFSLAILSPHGYFGQANVLGLPDTGGQVVYILDQVRALEREMRQRLAEQGLDIEPQILVVTRLIPEAGGTTCDQRLEPIVGTENARILRVPFRNEDGEVVPHWISRFEVWPYLERFALDVEREILAELGGRPDLIIGNYSDGNLVATLLSQKLGVTQCNIAHALEKTKYLYSDLYWRDNEEQYHFSCQFTADLIAMNAADFIITSTYQEIAGTDESVGQYESYSAFTMPGLYRVVNGIDVFDPKFNIVSPGADAEVYFPYTETERRLTGLHPEIEELVFGDEPRPDARGVLADPDKPLLFTVARLDRIKNITGLVEWYGASPRLRELANLLVIAGHVDPAQSDDREEREQIARMHELMDRHGLDGQVRWLGTHLDKNLVGELYRFVADRRGAFVQPALFEAFGLTVIEAMSSGLPTFATRYGGPLEIIEDGVSGFHIDPNHGEAAAELMADFFERCAADPGYWERISRGALERVRARYTWELYAERMMTLSRIYGFWKYVTNRERQVTRRYLQMFRHLQFRPLAHAVPLE

SEQ ID NO: 1068 - protein, 793 aa, Artificial Sequence
  engineered sucrose synthase encoded in plasmid pA32760
MIETLRQFLAEHRDAVYLLLRHYVGLGRPFLLRSDLWDEFERFCEEHGEEEELADSPLARLIAKAQEAVLDAPWIYLAVRPRVARWEYLRIHLETLDVEEISVSEFLAFKERLVNGDPEGDAVLEVDLGDFNREFQKLKDESTIGRGVEHLNRHLSGRLWQDLGKGDERLLEFLRVHQYRGRQLMLNDRIRSFDELRRALQYLGRQPPDAPWEEVGHTLQELGFEPGWGRTVARIRDTLRLLMDILDSPSPETLERFLGRIPMIFSIAILSPHGYFGQSNVLGLPDTGGQVVYILDQVRALEREMRRRLAEQGLDIEPQILVVTRLIPEAGGTTCDQRLEPIVGTRNARILRVPFRNEDGEVVPHWISRFEIWPYLERFALDVERELLAELGGRPDLIIGNYSDGNLVATLLSQKLGVTQCNIAHALEKTKYLYSDLYWRDNEEQYHFSCQFTADLIAMNAADFIITSTYQEIAGTDDSVGQYESYAAFTMPGLYRVVNGIDVFDPKFNIVSPGADAEVYFPYTETERRLTGLHPEIEELIFGGEPRADSRGVLADRDKPLLFTVARLDRIKNITGLVEWYGESERLRELANLLVVAGHVDPARSGDREEREQIGRMHELMDEHGLDGQVRWLGVHLDKNLVGELYRYVADRRGAFVQPALFEAFGLTVIEAMSSGLPTFATCYGGPLEIIEHGVSGFHIDPNHGEEAAEKIADFFERCAADPGYWERISQGALARVRSRYTWELYAERMMTLSRIYGFWKYVTNRERQVTRRYLQMFRHLQFRPLAHAVPLE

SEQ ID NO: 1069 - protein, 793 aa, Artificial Sequence
  engineered sucrose synthase encoded in plasmid pA32761
MIEELREFLAEHREAVYLLLRRYLALGRPFLLRSDLWDEFEAFCEEEGEEEELLDSPLARAIRRAQEAAVDAPWVYLAVRPRVARWRYLRFHVETLDVEEISVSEFLAFKERLVGGDAEGEAVLEVDLGDFNREFQKLKDESTIGRGVEHLNRHLSGRLWQDLGRGDQRLLEFLRVHQYRGQQLMLNDRIKDFDELRRALQYLGGQPPEAPWEEVAHELQELGFEPGWGRTVARIRETLRLLMDILDSPSPANLERFLGRIPMIFSIAILSPHGYFGQANVLGLPDTGGQVVYILDQVRALEREMRQRLAEQGLDIEPQILVVTRLIPEAEGTTCDQRLEPIVGTENARILRVPFRNEDGEVIPHWISRFEVWPYLERFALDVERELLAELGGRPDLIIGNYSDGNLVATLLSQKLGVTQCNIAHALEKTKYLYSDLYWRDNEAQYHFSCQFTADLIAMNAADFIITSTYQEIAGTDDSVGQYESYGAFTMPGLYRVVNGIDVFDPKFNIVSPGADAEVYFPYTETERRLTGLHPEIEELLYGGEPRPDARGVLADPDKPLLFTVARLDRIKNITGLVEWYGASPRLRELANLLVVAGHVDPAKSADREERAQIARMHELMDRYGLDGQVRWLGLHLEKNLVGELYRYVADRRGAFVQPALFEAFGLTVIEAMSSGLPTFATCYGGPLEIIEDGVSGFHIDPNHGDAAAEIMADFFERCAADPGYWERISRGALERVRARYTWELYAERMMTLSRIYGFWKYVTNRERQVTRRYLQMFRHLQFRPLAHAVPLE

SEQ ID NO: 1070 - protein, 793 aa, Artificial Sequence
  engineered sucrose synthase encoded in plasmid pA32763
MIETLREFLAEHRDAVYLLLRHYLALGRPFLLRSDLWDEFLAFCAEEGEEEGLCDSPLARAIARTQEAVLDAPWIYLAVRPRVARWRYLRIHLETLEVEEISVSEFLAFKERLVTGAPEGEAVLEVDLGDFNREFQKLKDESTIGRGVEHLNRHLSGRLWQDLGKGDQRLLDFLRVHQYRGQQLMLNDRIRDFDALRRALQYLGRQPPEAPWEEVAHTLQALGFEPGWGRTAARMRDTMRLLMDILDSPSPATLERFLGRIPMIFSLAILSPHGYFGQANVLGLPDTGGQVVYILDQVRALEKEMRRRLAEQGLDIEPQILVVTRLIPEAGGTTCDQRLEPIVGTENARILRVPFRNEDGEVVPHWISRFEVWPYLERFALDVEKELLAELGGRPDLIIGNYSDGNLVATLLSQKLGVTQCNIAHALEKTKYLYSDLYWRDNEEQYHFSCQFTADLIAMNAADFIITSTYQEIAGTDDSVGQYESYSAFTMPGLYRVVNGIDVFDPKFNIVSPGADAEVYFPYTETERRLTGLHPEIEELIFGGEPRPDARGVLAEPDKPLLFTVARLDRIKNITGLVDWYGASPRLRELANLLVIAGHVDPARSDDEEEREQIERMHELMDRYGLDGQVRWLGLHLEKNLVGELYRYVADRRGAFVQPALFEAFGLTVIEAMASGLPTFATCYGGPLEIIEHGVSGFHIDPNHGEAAAERMADFFERCAAEPGYWERISQGALERVRSRYTWRLYAERMMTLSRIYGFWKYVTNRERQVTRRYLQMFRHLQFRPLAHAVPLE

SEQ ID NO: 1071 - protein, 793 aa, Artificial Sequence
  engineered sucrose synthase encoded in plasmid pA32765
MIEALRQFLAEHRDAVYLLLRRYLGLGRPFLLRSDLWDEFARFCEEDGEEEGLADSPLGRVIRRTQEAAIDAPWIYFAVRPRVARWEYLRIHVETLEVEEISVSEYLAFKERLVTGDAEGDAVLEVDLGDFNREFQKLKDESTIGRGVEHLNRHLSGRLWQDLGKGDQRLLDFLRVHQYRGQQLMLNERIRSFDELRQALQYLGRQPDDAPWEEVAHKLQELGFEPGWGRTVARMRDTLRLLMDILDSPSPETLERFLGRIPMIFSLAILSPHGYFGQSNVLGRPDTGGQVVYILDQVRALEKEMRRRLAEQGLDIEPQILVVTRLIPEAEGTTCDQRLEPIVGTRNARILRVPFRNEDGEVLPHWISRFEVWPYLERFALDVERELLAELGGRPDLIIGNYSDGNLVATLLSQKLGVTQCNIAHALEKTKYLYSDLYWRDNEEQYHFSCQFTADLIAMNAADFIITSTYQEIAGTDDSVGQYESYAAFTMPGLYRVVNGIDVFDPKFNIVSPGADAEVYFPYTETERRLTGLHPEIEELVFGGEERPDARGVLADRDKPLLFTVARLDRIKNITGLVEWYGASPRLRELANLVVIAGHVDPAQSDDEEEREQIARMHELMDRHGLDGQVRWLGLHLDKNLVGELYRYVADRRGAFVQPALFEAFGLTVIEAMSSGLPTFATCYGGPLEIIEHGVSGFHIDPNHGEAAAELIADFFERCAAEPGYWERISQGALERVRARYTWELYAERMMTLSRIYGFWKYVTNRERQVTRRYLQMFRHLQFRPLAHAVPLE

SEQ ID NO: 1072 - protein, 793 aa, Artificial Sequence
  engineered sucrose synthase encoded in plasmid pA32769
MIESLREFLAEHRDAVYRLLRHYLGLGRPFLLRSDLWDEFEAFCEEQGEEEELADSPLGRAIRRTQEAVLDAPWVYLAVRPRVARWEYLRFHLETLEVEEISVSEFLAFKERLVNGAAEGDAVLEVDFGDFNREFQKLKDESTIGRGVEHLNRHLSGRLWQDLGKGDQRLLDFLRVHQYRGRQLMLNDRIRDFDALRRALQYLGTQPPDAPWEEVAHTLQELGFEPGWGRTAARMRETLRLLMDILDSPSPGNLERFLGRIPMIFSIAILSPHGYFGQANVLGLPDTGGQVVYILDQVRALEREMRRRLHEQGLDIEPQILVVTRLIPEAGGTTCDQRLEPIVGTENARILRVPFRNEDGEVIPHWISRFEVWPYLERFAQDVEREILAELGGRPDLIIGNYSDGNLVATLLAQKLGVTQCNIAHALEKTKYLYSDLYWRDNEEQYHFSCQFTADLIAMNAADFIITSTYQEIAGTDDSVGQYESYAAFTMPGLYRVVNGIDVFDPKFNIVSPGADAEVYFPYTETERRLTGLHPEIEELLFGGEERPDARGVLADRDKPLLFTVARLDRIKNITGLVEWYGANERLRELANLLVVAGHVDPAQSSDREERAQIARMHELMDEYGLDGQVRWLGLHLDKNLVGELYRYVADRRGAFVQPALFEAFGLTVIEAMASGLPTFATRYGGPLEIIEHGVSGFHIDPNHGEEAAELIADFFERCAADPGYWERISQGALARVRSRYTWKLYAERMMTLSRIYGFWKYVTNRERQVTRRYLQMFRHLQFRPLAHAVPLE

SEQ ID NO: 1073 - protein, 793 aa, Artificial Sequence
  engineered sucrose synthase encoded in plasmid pA32775
MIESLREYLAEHRDAVYLLLRRYLALGRPFLLRSDLWDEFDRFCEEEGEEEGLKDSPLARLIRAAQEAVVDAPWVYLAVRPRVARWRYLRIHVETLEVEEISVSEFLAFKERLVNGDAEGEAVLEVDLGDFNREFQKLKDESTIGRGVEHLNRHLSGRLWQDLGKGDRRLLEFLRVHQYRGQQLMLNGRITDFDALRRALQYLGRQPDDAPWDEVGHRLQELGFEPGWGRTAARMRDTLRLLMDILDSPSPETLERFLGRIPMIFSLAILSPHGYFGQANVLGLPDTGGQVVYILDQVRALEREMRRRLAEQGLDIEPQILVVTRLIPEAGGTTCDQRLEPIVGTENARILRVPFRNEDGEVVPQWISRFEVWPYLERFALDVERELLAELGGRPDLIIGNYSDGNLVATLLSQKLGVTQCNIAHALEKTKYLYSDLYWKDNEEQYHFSCQFTADLIAMNAADFIITSTYQEIAGTDDSVGQYESYSAFTMPGLYRVVNGIDVFDPKFNIVSPGADAEVYFPYTEKERRLTGLHPEIEELIYGGEPRPDARGVFAEPDKPLLFTVARLDRIKNITGLVEWYGASERLRELANLLVIAGHVDPAQSDDREERAQIERMHQLMDEYGLDGQVRWLGLHLDKNLVGELYRYVADRRGAFVQPALFEAFGLTVIEAMSSGLPTFATCYGGPLEIIEHGVSGFHIDPNHGEEAAEIIADFFERCAAEPGYWERISQGALERVRSRYTWELYAERMMTLSRIYGFWKYVTNRERQVTRRYLQMFRHLQFRPLAHAVPLE

SEQ ID NO: 1074 - protein, 793 aa, Artificial Sequence
  engineered sucrose synthase encoded in plasmid pA32780
MIEELDQFLAEHRDAVYLLLRHYLGLGRPFLLRSDLWDEFLAFCEEEGEEEELLDSPLARLIARAQEAAIDAPWIYLALRPRVARWEYLRIHLETLDVEEISVSEFLAFKERLVNGDAEGEAVLEVDFGDFNREFQKLKDESTIGRGVEHLNRHLSGRLWQDLGKGDQRLLEFLRVHQYRGQQLMLNDRIRDFDELRQALQYLGGQPPEAPWEEVGHDLQRLGFEPGWGRTVARMRDTMRLLMDILDSPSPANLERFLGRIPMIFSIAILSPHGYFGQANVLGLPDTGGQVVYILDQVRALEREMRRRLAEQGLDIEPQILVVTRLIPEAGGTTCDQRLEPIVGTENARILRVPFRNEDGEVIPHWISRFEVWPYLERFALDAERELLAELGGRPDLIIGNYSDGNLVATLLSQKLGVTQCNIAHALEKTKYLYSDLYWRDNEEQYHFSCQFTADLIAMNAADFIITSTYQEIAGTDDSVGQYESYSAFTMPGLYRVVNGIDVFDPKFNIVSPGADAEVYFPYSEEERRLTGLHPEIEELIYGGEPRPDARGVLAERDKPLLFTVARLDRIKNITGLVEWYGRSERLRELANLLVVAGHVDPAQSGDEEERAQIRRMHELMDRYGLDGQVRWLGVHLDKNLVGELYRYVADRRGAFVQPALFEAFGLTVIEAMASGLPTFATCYGGPLEIIEDGVSGFHIDPNHGEEAAELIADFFERCAADPGYWERISRGALERVESRYTWELYAERMMTLSRIYGFWKYVTNRERQVTRRYLQMFRHLQFRPLAHAVPLE

SEQ ID NO: 1075 - protein, 793 aa, Artificial Sequence
  engineered sucrose synthase encoded in plasmid pA32782
MIESLEEFLSEHRDALYLLLRRYVSLGRPFLLRSDLWDEFERFCEEEGEESPLKDSPLARAIAATQEAALDAPWIYLAVRPRVARWEYLRIHVETLEVEEISVSEFLAFKERLVNGDPEGDAVLEVDLGDFNREFQKLKDESTIGRGVEHLNRHLSGRLWQDLGKGDRRLLEFLRVHQYRGQQLMLNDRIRDFDELRRAEQYLGRQPPEAPWEEVAHTLQELGFEPGWGRTAARMRETLRLLMDILDSPSPATLERFLGRIPMIFSIAILSPHGYFGQANVLGLPDTGGQVVYILDQVRALEREMRRRLAEQGLDIEPQILVVTRLIPEAEGTTCDQRLEPIVGTENARILRVPFRNEDGEVLPHWISRFEVWPYLERFALDVERELLAELGGRPDLIIGNYSDGNLVATLLAQKLGVTQCNIAHALEKTKYLYSDLYWRDNEEQYHFSCQFTADLIAMNAADFIITSTYQEIAGTDDSVGQYESYSAFTMPGLYRVVNGIDVFDPKFNIVSPGADAEIYFPYTETERRLTGLHPEIEELVFGEEERPDARGVLADPDKPLLFTVARLDRIKNITGLVEWYGASERLRELANLLVVAGHVDPARSDDREERAQIARMHELMDEHGLDGQVRWLGVHLEKNLVGELYRYVADRRGAFVQPALFEAFGLTVIEAMSSGLPTFATCYGGPLEIIEDGVSGFHIDPNHGEEAAELIADFFERCAADPGYWERISRGALERVRERYTWELYAERLMTLSRIYGFWKYVTNRERQVTRRYLQMFRHLQFRPLAHAVPLE

SEQ ID NO: 1076 - protein, 793 aa, Artificial Sequence
  engineered sucrose synthase encoded in plasmid pA32785
MLETLREFLSEHRDAVYLLLRRYLALGRPFLLRSDLWDEFLAFCEEQGEEEGLLDSPLARAIAQTQEAALDAPWIYLAVRPRVARWRYLRFHLETLDVEEISVSEFLAFKERLVEGDPEGEAVLEVDLGDFNREFQKLKDESTIGRGVEHLNRHLSGRLWQDLGKGDQRLLEFLRVHQYRGQQLMLNDRIDDFDGLRRAEQYLGRQPDDAPWEEVGHELQELGFEPGWGRTAARMRDTLRLLMDILDSPSPETLERFLGRIPMIFSIAILSPHGYFGQSNVLGLPDTGGQVVYILDQVRALEKEMRRRLAEQGLDIEPQILVVTRLIPEAGGTTCDQRLEPIVGTENARILRVPFRNEDGEVLPQWISRFEVWPYLERFALDVEREILAELGGRPDLIIGNYSDGNLVATLLAQKLGVTQCNIAHALEKTKYLYSDLYWRDNEPQYHFSCQFTADLIAMNAADFIITSTYQEIAGRDDSVGQYESYGAFTMPGLYRVVNGIDVFDPKFNIVSPGADAEVYFPYTETERRLTGLHPEIEELLFGGEERPDARGVLADRDKPLLFTVARLDRIKNITGLVEWYGASERLRELANLLVVAGHVDPEQSSDREEREQIERMHELMDRHGLDGQVRWLGLHLDKNLVGELYRYVADRRGAFVQPALFEAFGLTVIEAMASGLPTFATRYGGPLEIIEHGVSGFHIDPNHGEEAAELIADFFERCAAEPGYWERISRGALERVRSRYTWELYAERMMTLSRIYGFWKYVTNRERQVTRRYLQMFRHLQFRPLAHAVPLE

SEQ ID NO: 1077 - protein, 793 aa, Artificial Sequence
  engineered sucrose synthase encoded in plasmid pA32791
MIEALREFLAEHRDAVYLLLRRYLGLGRPFLLRSDLWDEFEAFCEEQGEEEGLLDSPLARLIARTQEAALDAPWIYFAVRPRVARWEYLRIHLETLDVEEISVSEFLAFKERLVGGDAEGEAVLEVDLGDFNREFQKLKDESTIGRGVEHLNRHLSGRLWQDLGKGDQRLLDFLRVHQYRGQQLMLNDRIRDFDALRRALQYLGRQPPDAPWEDVAHELQDLGFEPGWGRTAARIRETMRLLMDILDSPSPETLERFLGRIPMIFSLAILSPHGYFGQANVLGLPDTGGQVVYILDQVRALEREMRRRLAEQGLDIEPQILVVTRLIPEAGGTTCDQRLEPIVGTRNARILRVPFRNEDGEIVPHWISRFEIWPYLERFALDVERELLAELGGRPDLIIGNYSDGNLVATLLSQKLGVTQCNIAHALEKTKYLYSDLYWQDNEPQYHFSCQFTADLIAMNAADFIITSTYQEIAGRDDSVGQYESYSAFTMPGLYRVVNGIDVFDPKFNIVSPGADAEVYFPYTETERRLTGLHPEIEELIFGGEDRPDARGVFADPDKPLLFTVARLDRIKNITGLVDWYGASPRLRELANLLVIAGHVDPARSGDREEREQIARMHELMDRHGLDGQVRWLGLHLDKNLVGELYRYVADRRGAFVQPALFEAFGLTVIEAMSSGLPTFATRYGGPLEIIEHGVSGFHIDPNHGEEAAELIADFFERCAAEPGYWERISRGALERVESRYTWKLYAERMMTLSRIYGFWKYVTNRERQVTRRYLQMFRHLQFRPLAHAVPLE

SEQ ID NO: 1078 - protein, 793 aa, Artificial Sequence
  engineered sucrose synthase encoded in plasmid pA32869
MIEELRQQLLDSPRSWRAFLRHLVASQRDSWLHTDLQRACKTFREQPPEGYPEDIGWLADFVAHTQEAIFRDPWMVFAWRLRPGVWEYVRIHVEQLAVEELSTDEYLQAKEQLVGLGAEGEAVLTVDFEDFRPVSQRLKDESTIGDGLTHLNRHLAGRIWTDLAAGRSQILEFLGLHRLDNQNLMLSNGNTDFDSLRQTVQYLGTLPRETPWAEFREDMRRRGFEPGWGNTAGRVRETMRLLMDLLDSPSPAALESFLDRIPMISNVLIVSIHGWFAQDKVLGRPDTGGQVVYILDQARALEREMRNRLRQQGVDVEPRILIATRLIPESDGTTCDQRLEPVHGAENVQILRVPFRYEDGRIHPHWISRFKVWPYLERYASDLEREVKAELGSRPDLIIGNYSDGNLVATLLSEKLGVTQCNIAHALEKSKYLYSDLHWPDHEQDHHFACQFTADLIAMNAADIIVTSTYQEIAGNDREVGQYESHQDYTLPGLYRVENGIDVFDSKFNIVSPGADPRTYFSYARTEERFSSLWPEIESLLFGREPGPDIRGVLEDRQKPIILSMSRLDRIKNQSGLAELYGRSSRLRSLANLVIIGGHVDVQNSMDAEEREEIRRLHEIIDHYQLDGQFRLVGSQLDKTVVGELYRVVADGRGVFVQPALFEAFGLTVIEAMSSGLPVFATRHGGPLEIIEDGVSGFHIDPNDPEATAEKLADFLEAARERPKYWEEISDAALARVSERYTWERYAERLMTIARCFGFWRFVLSRESQVMERYLQMFRHLQWRPLAHAVPME

SEQ ID NO: 1079 - protein, 793 aa, Artificial Sequence
  engineered sucrose synthase encoded in plasmid pA32871
MIEELRQQLLDSPRSWRAFLRHLVASQRDSWLHTDLQRACKTFREQPPEGYPEDIGWLADFVAHTQEAIFRDPWMVFAWRLRPGVWEYVRIHVEQLAVEELSTDEYLQAKEQLVGLGAEGEAVLTVDFEDFRPVSQRLKDESTIGDGLTHLNRHLAGRIWTDLAAGRSQILEFLGLHRLDNQNLMLSNGNTDFDSLRQTVQYLGTLPRETPWAEFREDMRRRGFEPGWGNTAGRVRETMRLLMDLLDSPSPAALESFLDRIPMISNVLIVSIHGWFAQDKVLGRPDTGGQVVYILDQARALEREMRNRLRQQGVDVEPRILIATRLIPESDGTTCDQRLEPVHGAENVQILRVPFRYEDGRIHPHWISRFKVWPYLERYASDLEREVKAELGSRPDLIIGNYSDGNLVATLLSEKLGVTQCNIAHALEKSKYLYSDLHWPDHEQDHHFACQFTADLIAMNAADIIVTSTYQEIAGNDREVGQYESHQDYTLPGLYRVENGIDVFDSKFNIVSPGADPRTYFSYARTEERFSSLWPEIESLWFGREPGPDIRGVLEDRQKPVILSMARMDRIKNLSGLAELYGRSSRLRSLANLIIIGGHVDVQNSMDAEEREEIRRMHEIMDHYQLDGQMRWIGSQLDKTVVGEIYRWVADGRGVWVQPALFEAFGLTVIEVMSSGLPVFATRHGGPLEIIEDGVSGFHIDPNDPEATAEKLADFLEAARERPKYWEEISDAALARVSERYTWERYAERLMTIARCFGFWRFVLSRESQVMERYLQMFRHLQWRPLAHAVPME

SEQ ID NO: 1080 - protein, 793 aa, Artificial Sequence
  engineered sucrose synthase encoded in plasmid pA32875
MIEELRQQLLDSPRSWRAFLRHLVASQRDSWLHTDLQRACKTFREQPPEGYPEDIGWLADFVAHTQEAIFRDPWMVFAWRLRPGVWEYVRIHVEQLAVEELSTDEYLQAKEQLVGLGAEGEAVLTVDFEDFRPVSQRLKDESTIGDGLTHLNRHIAGRIWTDLAAGRSQIIEWLGLHRIDNQNLWLSNGNTDLDSLRQILQYLGTLPRETPWAEFREDWRRRGWEPGWGNTAGRVRETLRIWWDLMDSPSPAAWESWLDRLPLISNVLIVSIHGWFAQDKVLGRPDTGGQVVYILDQARALEREMRNRLRQQGIDIEPRILIATRLIPESDGTTCDQRLEPVHGAENVQILRVPFRYEDGRIHPHWISRFKVWPYLERYASDLEREVKAELGSRPDLIIGNYSDGNLVATLLSEKLGVTQCNIAHALEKSKYLYSDLHWPDHEQDHHFACQFTADLIAMNAADIIVTSTYQEIAGNDREVGQYESHQDYTLPGLYRVENGIDVFDSKFNIVSPGADPRTYFSYARTEERFSSLWPEIESLLFGREPGPDIRGVLEDRQKPIILSMARMDRIKNLSGLAELYGRSSRLRSLANLVIIGGHVDVQNSMDAEEREEIRRMHEIMDHYQLDGQMRWVGSQLDKTVVGELYRVVADGRGVFVQPALFEAFGLTVIEAMSSGLPVFATRHGGPLEIIEDGVSGFHIDPNDPEATAEKLADFLEAARERPKYWEEISDAALARVSERYTWERYAERLMTIARVFGWWRFVLSRESQVMERYLQMFRHLQWRPLAHAVPME

SEQ ID NO: 1081 - protein, 793 aa, Artificial Sequence
  engineered sucrose synthase encoded in plasmid pA32879
MIEELRQQLLDSPRSWRAFLRHLVASQRDSWLHTDLQRACKTFREQPPEGYPEDIGWLADFVAHTQEAIFRDPWMVFAWRLRPGVWEYVRIHVEQLAVEELSTDEYLQAKEQLVGLGAEGEAVLTVDFEDFRPVSQRLKDESTIGDGLTHLNRHLAGRLWTDLAAGRSQLLEFLGLHRIDNQNLWLSNGNTDLDSLRQILQYLGTLPRETPWAEFREDLRRRGIEPGWGNTAGRVRETWRIWLDLLDSPSPAAIESWLDRLPLISNVLIVSIHGWFAQDKVLGRPDTGGQVVYILDQARALEREMRNRLRQQGIDIEPRILIATRLIPESDGTTCDQRLEPVHGAENVQILRVPFRYEDGRIHPHWISRFKVWPYLERYASDLEREVKAELGSRPDLIIGNYSDGNLVATLLSEKLGVTQCNIAHALEKSKYLYSDLHWPDHEQDHHFACQFTADLIAMNAADIIVTSTYQEIAGNDREVGQYESHQDYTLPGLYRVENGIDVFDSKFNIVSPGADPRTYFSYARTEERFSSLWPEIESLLFGREPGPDIRGVLEDRQKPIILSMARMDRIKNLSGLAELYGRSSRLRSLANLVIIGGHVDVQNSMDAEEREEIRRMHEIMDHYQLDGQMRWVGSQLDKTVVGELYRVVADGRGVFVQPALFEAFGLTVIEAMSSGLPVFATRHGGPLEIIEDGVSGFHIDPNDPEATAEKLADFLEAARERPKYWEEISDAALARVSERYTWERYAERLMTIARVFGWWRFILSRESQVMERYLQMFRHLQWRPLAHAVPME

SEQ ID NO: 1082 - protein, 793 aa, Artificial Sequence
  engineered sucrose synthase encoded in plasmid pA32881
MIEELRQQLLDSPRSWRAFLRHLVASQRDSWLHTDLQRACKTFREQPPEGYPEDIGWLADFVAHTQEAIFRDPWMVFAWRLRPGVWEYVRIHVEQLAVEELSTDEYLQAKEQLVGLGAEGEAVLTVDFEDFRPVSQRLKDESTIGDGLTHLNRHLAGRLWTDLAAGRSQILEFLGLHRIDNQNLMLSNGNTDFDSLRQVMQYLGTQPRETPMAEVREDLRRRGFEPGWGNTAGRIRETMRLLYDLLDSPSPAALESFLDRIPMISNVLIVSIHGWFAQDKVLGRPDTGGQVVYILDQARALEREMRNRLRQQGIDVEPRILIATRLIPESDGTTCDQRLEPVHGAENVQILRVPFRYEDGRIHPHWISRFKVWPYLERYASDLEREVKAELGSRPDLIIGNYSDGNLVATLLSEKLGVTQCNIAHALEKSKYLYSDLHWPDHEQDHHFACQFTADLIAMNAADIIVTSTYQEIAGNDREVGQYESHQDYTLPGLYRVENGIDVFDSKFNIVSPGADPRTYFSYARTEERFSSLWPEIESLLFGREPGPDIRGVLEDRQKPIILSMARMDRIKNLSGLAELYGRSSRLRSLANLVIIGGHVDVQNSMDAEEREEIRRMHEIMDHYQLDGQMRWVGSQLDKTVVGELYRVVADGRGVFVQPALFEAFGLTVIEAMSSGLPVFATRHGGPLEIIEDGVSGFHIDPNDPEATAEKLADFLEAARERPKYWEEISDAALARVSERYTWERYAERLMTIARAFGFWRFVLSRESQVMERYLQMFRHLQWRPLAHAVPME

SEQ ID NO: 1083 - protein, 793 aa, Artificial Sequence
  engineered sucrose synthase encoded in plasmid pA32882
MIEELRQQLLDSPRSWRAFLRHLVASQRDSWLHTDLQRACKTFREQPPEGYPEDIGWLADFVAHTQEAIFRDPWMVFAWRLRPGVWEYVRIHVEQLAVEELSTDEYLQAKEQLVGLGAEGEAVLTVDFEDFRPVSQRLKDESTIGDGLTHLNRHLAGRIWTDLAAGRSQILEFLGLHRLDNQNLMLSNGNTDFDSLRQTVQYLGTLPRETPWAEFREDMRRRGFEPGWGNTAGRVRETMRLLMDLLDSPSPAALESFLDRIPMISNILIVSIHGWFAQDKVLGRPDTGGQVVFILDQARAWEREIRNRLRQQGVDVEPRILIATRLIPESDGTTCDQRLEPVHGAENVQILRVPFRYEDGRIHPHWISRFKVWPYLERYASDLEREVKAELGSRPDIIVGNYSDGNLVATLLSEKLGVTQVNIAHALEKSKYLYSDLHWPDHEQDHHFACQFTADLIAMNAADMIITSTYQEIAGNDREVGQYESHQDYTLPGLYRVENGIDVFDSKFNILSPGADPRTYFSYARTEERFSSLWPEIESLLFGREPGPDIRGVLEDRQKPIILSMARMDRIKNLSGLAELYGRSSRLRSLANLVIIGGHVDVQNSMDAEEREEIRRMHEIMDHYQLDGQMRWVGSQLDKTVVGELYRVVADGRGVFVQPALFEAFGLTVIEAMSSGLPVFATRHGGPLEIIEDGVSGFHIDPNDPEATAEKLADFLEAARERPKYWEEISDAALARVSERYTWERWAERWLTWVRCWGFWRFVLSRESQVMERYLQMFRHLQWRPLAHAVPME

SEQ ID NO: 1084 - protein, 793 aa, Artificial Sequence
  engineered sucrose synthase encoded in plasmid pA32884
MIEELRQQLLDSPRSWRAFLRHLVASQRDSWLHTDLQRACKTFREQPPEGYPEDIGWLADFVAHTQEAIFRDPWMVFAWRLRPGVWEYVRIHVEQLAVEELSTDEYLQAKEQLVGLGAEGEAVLTVDFEDFRPVSQRLKDESTIGDGLTHLNRHLAGRIWTDLAAGRSQILEFLGLHRLDNQNLMLSNGNTDFDSLRQTVQYLGTLPRETPWAEFREDMRRRGFEPGWGNTAGRVRETMRLLMDLLDSPSPAALESFLDRIPMISNILIVSIHGWFAQDKVLGRPDTGGQVVFILDQARALEREIRNRLRQQGVDVEPRILIATRLIPESDGTTCDQRLEPVHGAENVQILRVPFRYEDGRIHPHWISRFKVWPYLERYASDLEREVKAELGSRPDVIIGNYSDGNLVATLLSEKLGVTQVNIAHALEKSKYLYSDLHWPDHEQDHHFACQFTADLIAMNAADVIITSTYQEIAGNDREVGQYESHQDYTLPGLYRVENGIDVFDSKFNIISPGADPRTYFSYARTEERFSSLWPEIESLLFGREPGPDIRGVLEDRQKPIILSMARMDRIKNLSGLAELYGRSSRLRSLANLVIIGGHVDVQNSMDAEEREEIRRMHEIMDHYQLDGQMRWVGSQLDKTVVGELYRVVADGRGVFVQPALFEAFGLTVIEAMSSGLPVFATRHGGPLEIIEDGVSGFHIDPNDPEATAEKLADFLEAARERPKYWEEISDAALARVSERYTWERWAERWLTLMRCIGFWRFVLSRESQVMERYLQMFRHLQWRPLAHAVPME

SEQ ID NO: 1085 - protein, 793 aa, Artificial Sequence
  engineered sucrose synthase encoded in plasmid pA32885
MIEELRQQLLDSPRSWRAFLRHLVASQRDSWLHTDLQRACKTFREQPPEGYPEDIGWLADFVAHTQEAIFRDPWMVFAWRLRPGVWEYVRIHVEQLAVEELSTDEYLQAKEQLVGLGAEGEAVLTVDFEDFRPVSQRLKDESTIGDGLTHLNRHLAGRIWTDLAAGRSQILEFLGLHRLDNQNLMLSNGNTDFDSLRQTVQYLGTLPRETPWAEFREDMRRRGFEPGWGNTAGRVRETMRLLMDLLDSPSPAALESFLDRIPMISNILIVSIHGWFAQDKVLGRPDTGGQVVWILDQARALERELRNRLRQQGVDVEPRILIATRLIPESDGTTCDQRLEPVHGAENVQILRVPFRYEDGRIHPHWISRFKVWPYLERYASDLEREVKAELGSRPDLIIGNYSDGNLVATLLSEKLGVTQVNVAHALEKSKYLYSDLHWPDHEQDHHFACQFTADLIAMNAADVIITSTYQEIAGNDREVGQYESHQDYTLPGLYRVENGIDVFDSKFNIISPGADPRTYFSYARTEERFSSLWPEIESLLFGREPGPDIRGVLEDRQKPIILSMARMDRIKNLSGLAELYGRSSRLRSLANLVIIGGHVDVQNSMDAEEREEIRRMHEIMDHYQLDGQMRWVGSQLDKTVVGELYRVVADGRGVFVQPALFEAFGLTVIEAMSSGLPVFATRHGGPLEIIEDGVSGFHIDPNDPEATAEKLADFLEAARERPKYWEEISDAALARVSERYTWERWAERLLTLWRCLGFWRFVLSRESQVMERYLQMFRHLQWRPLAHAVPME

SEQ ID NO: 1086 - protein, 793 aa, Artificial Sequence
  engineered sucrose synthase encoded in plasmid pA32886
MIEELRQQLLDSPRSWRAFLRHLVASQRDSWLHTDLQRACKTFREQPPEGYPEDIGWLADFVAHTQEAIFRDPWMVFAWRLRPGVWEYVRIHVEQLAVEELSTDEYLQAKEQLVGLGAEGEAVLTVDFEDFRPVSQRLKDESTIGDGLTHLNRHLAGRIWTDLAAGRSQILEFLGLHRLDNQNLMLSNGNTDFDSLRQTVQYLGTLPRETPWAEFREDMRRRGFEPGWGNTAGRVRETMRLLMDLLDSPSPAALESFLDRIPMISNILIVSIHGWFAQDKVLGRPDTGGQVVWILDQARALERELRNRLRQQGVDVEPRILIATRLIPESDGTTCDQRLEPVHGAENVQILRVPFRYEDGRIHPHWISRFKVWPYLERYASDLEREVKAELGSRPDVIIGNYSDGNLVATLLSEKLGVTQINIAHALEKSKYLYSDLHWPDHEQDHHFACQFTADLIAMNAADMIITSTYQEIAGNDREVGQYESHQDYTLPGLYRVENGIDVFDSKFNIISPGADPRTYFSYARTEERFSSLWPEIESLLFGREPGPDIRGVLEDRQKPIILSMARMDRIKNLSGLAELYGRSSRLRSLANLVIIGGHVDVQNSMDAEEREEIRRMHEIMDHYQLDGQMRWVGSQLDKTVVGELYRVVADGRGVFVQPALFEAFGLTVIEAMSSGLPVFATRHGGPLEIIEDGVSGFHIDPNDPEATAEKLADFLEAARERPKYWEEISDAALARVSERYTWERWAERWLTIVRCYGFWRFVLSRESQVMERYLQMFRHLQWRPLAHAVPME

SEQ ID NO: 1087 - protein, 793 aa, Artificial Sequence
  engineered sucrose synthase encoded in plasmid pA32888
MIEELRQQLLDSPRSWRAFLRHLVASQRDSWLHTDLQRACKTFREQPPEGYPEDIGWLADFVAHTQEAIFRDPWMVFAWRLRPGVWEYVRIHVEQLAVEELSTDEYLQAKEQLVGLGAEGEAVLTVDFEDFRPVSQRLKDESTIGDGLTHLNRHLAGRIWTDLAAGRSQILEFLGLHRLDNQNLMLSNGNTDFDSLRQTVQYLGTLPRETPWAEFREDMRRRGFEPGWGNTAGRVRETMRLLMDLLDSPSPAALESFLDRIPMISNVLIVSIHGWFAQDKVLGRPDTGGQVVYILDQARALEREMRNRLRQQGVDVEPRILIATRLIPESDGTTCDQRLEPVHGAENVQILRVPFRYEDGRIHPHWISRFKVWPYLERYASDLEREVKAELGSRPDLIIGNYSDGNLVATLLSEKLGVTQINIAHALEKSKYLYSDLHWPDHEQDHHFACQFTADLIAMNAADAIVTSTYQEIAGNDREVGQYESHQDYTLPGLYRVENGIDVFDSKFNIISPGADPRTYFSYARTEERFSSLWPEIESLLFGREPGPDIRGVLEDRQKPIILSMARMDRIKNLSGLAELYGRSSRLRSLANLVIIGGHVDVQNSMDAEEREEIRRMHEIMDHYQLDGQMRWVGSQLDKTVVGELYRVVADGRGVFVQPALFEAFGLTVIEAMSSGLPVFATRHGGPLEIIEDGVSGFHIDPNDPEATAEKLADFLEAARERPKYWEEISDAALARVSERYTWERYAERLLTLARCIGFWRFVLSRESQVMERYLQMFRHLQWRPLAHAVPME

SEQ ID NO: 1088 - protein, 793 aa, Artificial Sequence
  engineered sucrose synthase encoded in plasmid pA32892
MIEELRQQLLDSPRSWRAFLRHLVASQRDSWLHTDLQRACKTFREQPPEGYPEDIGWLADFVAHTQEAIFRDPWMVFAWRLRPGVWEYVRIHVEQLAVEELSTDEYLQAKEQLVGLGAEGEAVLTVDFEDFRPVSQRLKDESTIGDGLTHLNRHLAGRIWTDLAAGRSQILEFLGLHRLDNQNLMLSNGNTDFDSLRQTVQYLGTLPRETPWAEFREDMRRRGFEPGWGNTAGRVRETMRLLMDLLDSPSPAALESFLDRIPMISNVIIISIHGWFAQDKVLGRPDTGGQVVYILDQARALEREMRNRLRQQGVDVEPRIIILTRLIPESDGTTCDQRLEPVHGAENVQILRIPFRYEDGRIHPHWISRFKVWPYLERWVSDVEREIKAELGSRPDLIIGNYSDGNLVATLLSEKWGVTQCNIAHALEKSKYLYSDLHWPDHEQDHHFACQFTADLIAMNAADIIVTSTYQEIAGNDREVGQYESHQDYTLPGLYRVENGIDVFDSKFNIVSPGADPRTYFSYARTEERFSSLWPEIESLLFGREPGPDIRGVLEDRQKPIILSMARMDRIKNLSGLAELYGRSSRLRSLANLVIIGGHVDVQNSMDAEEREEIRRMHEIMDHYQLDGQMRWVGSQLDKTVVGELYRVVADGRGVFVQPALFEAFGLTVIEAMSSGLPVFATRHGGPLEIIEDGVSGFHIDPNDPEATAEKLADFLEAARERPKYWEEISDAALARVSERYTWERYAERLMTIARCFGFWRFVLSRESQVMERYLQMFRHLQWRPLAHAVPME

SEQ ID NO: 1089 - protein, 793 aa, Artificial Sequence
  engineered sucrose synthase encoded in plasmid pA32894
MIEELRQQLLDSPRSWRAFLRHLVASQRDSWLHTDLQRACKTFREQPPEGYPEDIGWLADFVAHTQEAIFRDPWMVFAWRLRPGVWEYVRIHVEQLAVEELSTDEYLQAKEQLVGLGAEGEAVLTVDFEDFRPVSQRLKDESTIGDGLTHLNRHLAGRIWTDLAAGRSQILEFLGLHRLDNQNLMLSNGNTDFDSLRQTVQYLGTLPRETPWAEFREDMRRRGFEPGWGNTAGRVRETMRLLMDLLDSPSPAALESFLDRIPMISNVVIVSIHGWFAQDKVLGRPDTGGQVVYILDQARALEREMRNRLRQQGVDVEPRILILTRLIPESDGTTCDQRLEPVHGAENVQILRVPFRYEDGRIHPHWISRFKVWPYLERFASDAEREIKAELGSRPDLIIGNYSDGNLVATLLSEKLGVTQCNIAHALEKSKYLYSDLHWPDHEQDHHFACQFTADLIAMNAADIIVTSTYQEIAGNDREVGQYESHQDYTLPGLYRVENGIDVFDSKFNIVSPGADPRTYFSYARTEERFSSLWPEIESLLFGREPGPDIRGVLEDRQKPIILSMARMDRIKNLSGLAELYGRSSRLRSLANLVIIGGHVDVQNSMDAEEREEIRRMHEIMDHYQLDGQMRWVGSQLDKTVVGELYRVVADGRGVFVQPALFEAFGLTVIEAMSSGLPVFATRHGGPLEIIEDGVSGFHIDPNDPEATAEKLADFLEAARERPKYWEEISDAALARVSERYTWERYAERLMTIARCFGFWRFVLSRESQVMERYLQMFRHLQWRPLAHAVPME

SEQ ID NO: 1090 - protein, 793 aa, Artificial Sequence
  engineered sucrose synthase encoded in plasmid pA32895
MIEELRQQLLDSPRSWRAFLRHLVASQRDSWLHTDLQRACKTFREQPPEGYPEDIGWLADFVAHTQEAIFRDPWMVFAWRLRPGVWEYVRIHVEQLAVEELSTDEYLQAKEQLVGLGAEGEAVLTVDFEDFRPVSQRLKDESTIGDGLTHLNRHLAGRIWTDLAAGRSQILEFLGLHRLDNQNLMLSNGNTDFDSLRQTVQYLGTLPRETPWAEFREDMRRRGFEPGWGNTAGRVRETMRLLMDLLDSPSPAALESFLDRIPMISNVLIVSIHGWFAQDKVLGRPDTGGQVVYILDQARALEREMRNRLRQQGVDVEPRILIATRLIPESDGTTCDQRLEPVHGAENVQILRVPFRYEDGRIHPHWISRFKVWPYLERYASDLEREVKAELGSRPDLIIGNYSDGNLVATLLSEKLGVTQCNIAHALEKSKYLYSDLHWPDHEQDHHFACQFTADLIAMNAADIIVTSTYQEIAGNDREVGQYESHQDYTLPGLYRVENGIDVFDSKFNIVSPGADPRTYFSYARTEERFSSLWPEIESLLFGREPGPDIRGVLEDRQKPIILSMMRLDRIKNMSGWLEIYGRSSRLRSLANLVLIGGHVDVQNSMDAEEREEVRRLHEILDHYQLDGQVRWVGSQLDKTVVGELYRVVADGRGIFIQPALFEAFGLTVIEAMSSGLPVWATRHGGPLEIIEDGVSGFHIDPNDPEATLEKIADWLEAARERPKYWEEISDAALARVSERYTWERYAERLMTIARCFGFWRFVLSRESQVMERYLQMFRHLQWRPLAHAVPME

SEQ ID NO: 1091 - protein, 793 aa, Artificial Sequence
  engineered sucrose synthase encoded in plasmid pA32902
MIEELRQQLLDSPRSWRAFLRHLVASQRDSWLHTDLQRACKTFREQPPEGYPEDIGWLADFVAHTQEAIFRDPWMVFAWRLRPGVWEYVRIHVEQLAVEELSTDEYLQAKEQLVGLGAEGEAVLTVDFEDFRPVSQRLKDESTIGDGLTHLNRHLAGRIWTDLAAGRSQILEFLGLHRLDNQNLMLSNGNTDFDSLRQTVQYLGTLPRETPWAEFREDMRRRGFEPGWGNTAGRVRETMRLLMDLLDSPSPAALESFLDRIPMISNVLIVSIHGWFAQDKVLGRPDTGGQVVYILDQARALEREMRNRLRQQGVDVEPRILIATRLIPESDGTTCDQRLEPVHGAENVQILRVPFRYEDGRIHPHWISRFKVWPYLERYASDLEREVKAELGSRPDLIIGNYSDGNLVATLLSEKLGVTQCNIAHALEKSKYLYSDLHWPDHEQDHHFACQFTADLIAMNAADIIVTSTYQEIAGNDREVGQYESHQDYTLPGLYRVENGIDVFDSKFNIVSPGADPRTYFSYARTEERFSSLWPEIESLWFGREPGPDIRGVLEDRQKPLILSIARMDRIKNLSGLAELYGRSSRLRSLANLLIIGGHVDVQNSMDAEEREEIRRMHEIMDHYQLDGQMRWIGSQLDKTLVGEIYRVLADGRGVVVQPALFEAFGLTVIEVMSSGLPVFATRHGGPLEIIEDGVSGFHIDPNDPEATAEKLADFLEAARERPKYWEEISDAALARVSERYTWERYAERLMTIARCFGFWRFVLSRESQVMERYLQMFRHLQWRPLAHAVPME

SEQ ID NO: 1092 - protein, 793 aa, Artificial Sequence
  engineered sucrose synthase encoded in plasmid pA32903
MIEELRQQLLDSPRSWRAFLRHLVASQRDSWLHTDLQRACKTFREQPPEGYPEDIGWLADFVAHTQEAIFRDPWMVFAWRLRPGVWEYVRIHVEQLAVEELSTDEYLQAKEQLVGLGAEGEAVLTVDFEDFRPVSQRLKDESTIGDGLTHLNRHLAGRIWTDLAAGRSQILEFLGLHRLDNQNLMLSNGNTDFDSLRQTVQYLGTLPRETPWAEFREDMRRRGFEPGWGNTAGRVRETMRLLMDLLDSPSPAALESFLDRIPMISNVLIVSIHGWFAQDKVLGRPDTGGQVVYILDQARALEREMRNRLRQQGVDVEPRILIATRLIPESDGTTCDQRLEPVHGAENVQILRVPFRYEDGRIHPHWISRFKVWPYLERYASDLEREVKAELGSRPDLIIGNYSDGNLVATLLSEKLGVTQCNIAHALEKSKYLYSDLHWPDHEQDHHFACQFTADLIAMNAADIIVTSTYQEIAGNDREVGQYESHQDYTLPGLYRVENGIDVFDSKFNIVSPGADPRTYFSYARTEERFSSLWPEIESIIFGREPGPDIRGVLEDRQKPIILSIARMDRIKNLSGLAELYGRSSRLRSLANLIIIGGHVDVQNSMDAEEREEIRRMHEIMDHYQLDGQMRWIGSQLDKTWVGELYRWLADGRGVVVQPALFEAFGLTVIEVMSSGLPVFATRHGGPLEIIEDGVSGFHIDPNDPEATAEKLADFLEAARERPKYWEEISDAALARVSERYTWERYAERLMTIARCFGFWRFVLSRESQVMERYLQMFRHLQWRPLAHAVPME

SEQ ID NO: 1093 - protein, 793 aa, Artificial Sequence
  engineered sucrose synthase encoded in plasmid pA32904
MIEELRQQLLDSPRSWRAFLRHLVASQRDSWLHTDLQRACKTFREQPPEGYPEDIGWLADFVAHTQEAIFRDPWMVFAWRLRPGVWEYVRIHVEQLAVEELSTDEYLQAKEQLVGLGAEGEAVLTVDFEDFRPVSQRLKDESTIGDGLTHLNRHLAGRIWTDLAAGRSQILEFLGLHRLDNQNLMLSNGNTDFDSLRQTVQYLGTLPRETPWAEFREDMRRRGFEPGWGNTAGRVRETMRLLMDLLDSPSPAALESFLDRIPMISNVLIVSIHGWFAQDKVLGRPDTGGQVVYILDQARALEREMRNRLRQQGVDVEPRILIATRLIPESDGTTCDQRLEPVHGAENVQILRVPFRYEDGRIHPHWISRFKVWPYLERYASDLEREVKAELGSRPDLIIGNYSDGNLVATLLSEKLGVTQCNIAHALEKSKYLYSDLHWPDHEQDHHFACQFTADLIAMNAADIIVTSTYQEIAGNDREVGQYESHQDYTLPGLYRVENGIDVFDSKFNIVSPGADPRTYFSYARTEERFSSLWPEIESMWFGREPGPDIRGVLEDRQKPIILSIARMDRIKNLSGLAELYGRSSRLRSLANLIIIGGHVDVQNSMDAEEREEIRRMHEIMDHYQLDGQMRWIGSQLDKTLVGEIYRVLADGRGVVVQPALFEAFGLTVIEVMSSGLPVFATRHGGPLEIIEDGVSGFHIDPNDPEATAEKLADFLEAARERPKYWEEISDAALARVSERYTWERYAERLMTIARCFGFWRFVLSRESQVMERYLQMFRHLQWRPLAHAVPME

SEQ ID NO: 1094 - protein, 793 aa, Artificial Sequence
  engineered sucrose synthase encoded in plasmid pA32906
MIEELRQQLLDSPRSWRAFLRHLVASQRDSWLHTDLQRACKTFREQPPEGYPEDIGWLADFVAHTQEAIFRDPWMVFAWRLRPGVWEYVRIHVEQLAVEELSTDEYLQAKEQLVGLGAEGEAVLTVDFEDFRPVSQRLKDESTIGDGLTHLNRHLAGRIWTDLAAGRSQILEFLGLHRLDNQNLMLSNGNTDFDSLRQTVQYLGTLPRETPWAEFREDMRRRGFEPGWGNTAGRVRETMRLLMDLLDSPSPAALESFLDRIPMISNVLIVSIHGWFAQDKVLGRPDTGGQVVYILDQARALEREMRNRLRQQGVDVEPRILIATRLIPESDGTTCDQRLEPVHGAENVQILRVPFRYEDGRIHPHWISRFKVWPYLERYASDLEREVKAELGSRPDLIIGNYSDGNLVATLLSEKLGVTQCNIAHALEKSKYLYSDLHWPDHEQDHHFACQFTADLIAMNAADIIVTSTYQEIAGNDREVGQYESHQDYTLPGLYRVENGIDVFDSKFNIVSPGADPRTYFSYARTEERFSSLWPEIESIWFGREPGPDIRGVLEDRQKPIILSMARMDRIKNLSGLAELYGRSSRLRSLANLIIIGGHVDVQNSMDAEEREEIRRMHEIMDHYQLDGQMRWIGSQLDKTLVGEIYRVLADGRGVVVQPALFEAFGLTVIEVMSSGLPVFATRHGGPLEIIEDGVSGFHIDPNDPEATAEKLADFLEAARERPKYWEEISDAALARVSERYTWERYAERLMTIARCFGFWRFVLSRESQVMERYLQMFRHLQWRPLAHAVPME

SEQ ID NO: 1095 - protein, 793 aa, Artificial Sequence
  engineered sucrose synthase encoded in plasmid pA32908
MIEELRQQLLDSPRSWRAFLRHLVASQRDSWLHTDLQRACKTFREQPPEGYPEDIGWLADFVAHTQEAIFRDPWMVFAWRLRPGVWEYVRIHVEQLAVEELSTDEYLQAKEQLVGLGAEGEAVLTVDFEDFRPVSQRLKDESTIGDGLTHLNRHIAGRLWTDTAAGRSQILEWLGLHRIDNQNLWWSNGNTDWDSVRQILQYLGTVPRETPWAELREDWRRRGWEPGWGNTAGRIRETLRILWDLIDSPSPAAWESWLDRVPIISNVLIVSIHGWFAQDKVLGRPDTGGQVVYILDQARALEREMRNRLRQQGIDVEPRILIATRLIPESDGTTCDQRLEPVHGAENVQILRVPFRYEDGRIHPHWISRFKVWPYLERYASDLEREVKAELGSRPDLIIGNYSDGNLVATLLSEKLGVTQCNIAHALEKSKYLYSDLHWPDHEQDHHFACQFTADLIAMNAADIIVTSTYQEIAGNDREVGQYESHQDYTLPGLYRVENGIDVFDSKFNIVSPGADPRTYFSYARTEERFSSLWPEIESLLFGREPGPDIRGVLEDRQKPIILSMARMDRIKNLSGLAELYGRSSRLRSLANLVIIGGHVDVQNSMDAEEREEIRRMHEIMDHYQLDGQMRWVGSQLDKTVVGELYRVVADGRGVFVQPALFEAFGLTVIEAMSSGLPVFATRHGGPLEIIEDGVSGFHIDPNDPEATAEKLADFLEAARERPKYWEEISDAALARVSERYTWERYAERLMTIARVFGWWRFVLSRESQVMERYLQMFRHLQWRPLAHAVPME

SEQ ID NO: 1096 - protein, 793 aa, Artificial Sequence
  engineered sucrose synthase encoded in plasmid pA32912
MIEELRQQLLDSPRSWRAFLRHLVASQRDSWLHTDLQRACKTFREQPPEGYPEDIGWLADFVAHTQEAIFRDPWMVFAWRLRPGVWEYVRIHVEQLAVEELSTDEYLQAKEQLVGLGAEGEAVLTVDFEDFRPVSQRLKDESTIGDGLTHLNRHIAGRLWTDLAAGRSQLLEWLGLHRIDNQNLWWSNGNTDWDSVRQILQYLGTLPRETPWAELREDWRRRGIEPGWGNTAGRVRETLRILWDLMDSPSPAALESWLDRVPIISNVLIVSIHGWFAQDKVLGRPDTGGQVVYILDQARALEREMRNRLRQQGIDVEPRILIATRLIPESDGTTCDQRLEPVHGAENVQILRVPFRYEDGRIHPHWISRFKVWPYLERYASDLEREVKAELGSRPDLIIGNYSDGNLVATLLSEKLGVTQCNIAHALEKSKYLYSDLHWPDHEQDHHFACQFTADLIAMNAADIIVTSTYQEIAGNDREVGQYESHQDYTLPGLYRVENGIDVFDSKFNIVSPGADPRTYFSYARTEERFSSLWPEIESLLFGREPGPDIRGVLEDRQKPIILSMARMDRIKNLSGLAELYGRSSRLRSLANLVIIGGHVDVQNSMDAEEREEIRRMHEIMDHYQLDGQMRWVGSQLDKTVVGELYRVVADGRGVFVQPALFEAFGLTVIEAMSSGLPVFATRHGGPLEIIEDGVSGFHIDPNDPEATAEKLADFLEAARERPKYWEEISDAALARVSERYTWERYAERLMTIARVFGLWRFWLSRESQVMERYLQMFRHLQWRPLAHAVPME

SEQ ID NO: 1097 - protein, 793 aa, Artificial Sequence
  engineered sucrose synthase encoded in plasmid pA32913
MIEELRQQLLDSPRSWRAFLRHLVASQRDSWLHTDLQRACKTFREQPPEGYPEDIGWLADFVAHTQEAIFRDPWMVFAWRLRPGVWEYVRIHVEQLAVEELSTDEYLQAKEQLVGLGAEGEAVLTVDFEDFRPVSQRLKDESTIGDGLTHINRHIAGRLWTDLAAGRSQILEWLGLHRIDNQNLWWSNGNTDWDSLRQIMQYLGTIPRETPWAELREDWRRRGWEPGWGNTAGRVRETLRIWLDLLDSPSPAAWESWLDRVPIISNVLIVSIHGWFAQDKVLGRPDTGGQVVYILDQARALEREMRNRLRQQGIDVEPRILIATRLIPESDGTTCDQRLEPVHGAENVQILRVPFRYEDGRIHPHWISRFKVWPYLERYASDLEREVKAELGSRPDLIIGNYSDGNLVATLLSEKLGVTQCNIAHALEKSKYLYSDLHWPDHEQDHHFACQFTADLIAMNAADIIVTSTYQEIAGNDREVGQYESHQDYTLPGLYRVENGIDVFDSKFNIVSPGADPRTYFSYARTEERFSSLWPEIESLLFGREPGPDIRGVLEDRQKPIILSMARMDRIKNLSGLAELYGRSSRLRSLANLVIIGGHVDVQNSMDAEEREEIRRMHEIMDHYQLDGQMRWVGSQLDKTVVGELYRVVADGRGVFVQPALFEAFGLTVIEAMSSGLPVFATRHGGPLEIIEDGVSGFHIDPNDPEATAEKLADFLEAARERPKYWEEISDAALARVSERYTWERYAERLMTIARVFGWWRFVLSRESQVMERYLQMFRHLQWRPLAHAVPME

SEQ ID NO: 1098 - protein, 793 aa, Artificial Sequence
  engineered sucrose synthase encoded in plasmid pA32914
MIEELRQQLLDSPRSWRAFLRHLVASQRDSWLHTDLQRACKTFREQPPEGYPEDIGWLADFVAHTQEAIFRDPWMVFAWRLRPGVWEYVRIHVEQLAVEELSTDEYLQAKEQLVGLGAEGEAVLTVDFEDFRPVSQRLKDESTIGDGLTHLNRHLAGRMWTDSAAGRSQLIEFLGLHRLDNQNLMWSNGNTDLDSTRQVLQYLGTLPRETPLAEFREDLRRRGFEPGWGNTAGRIRETMRLLADLLDSPSPAALESFLDRIPMISNVLIVSIHGWFAQDKVLGRPDTGGQVVYILDQARALEREMRNRLRQQGIDVEPRILIATRLIPESDGTTCDQRLEPVHGAENVQILRVPFRYEDGRIHPHWISRFKVWPYLERYASDLEREVKAELGSRPDLIIGNYSDGNLVATLLSEKLGVTQCNIAHALEKSKYLYSDLHWPDHEQDHHFACQFTADLIAMNAADIIVTSTYQEIAGNDREVGQYESHQDYTLPGLYRVENGIDVFDSKFNIVSPGADPRTYFSYARTEERFSSLWPEIESLLFGREPGPDIRGVLEDRQKPIILSMARMDRIKNLSGLAELYGRSSRLRSLANLVIIGGHVDVQNSMDAEEREEIRRMHEIMDHYQLDGQMRWVGSQLDKTVVGELYRVVADGRGVFVQPALFEAFGLTVIEAMSSGLPVFATRHGGPLEIIEDGVSGFHIDPNDPEATAEKLADFLEAARERPKYWEEISDAALARVSERYTWERYAERLMTIARAFGFWRFVLSRESQVMERYLQMFRHLQWRPLAHAVPME

SEQ ID NO: 1099 - protein, 793 aa, Artificial Sequence
  engineered sucrose synthase encoded in plasmid pA32917
MIEELRQQLLDSPRSWRAFLRHLVASQRDSWLHTDLQRACKTFREQPPEGYPEDIGWLADFVAHTQEAIFRDPWMVFAWRLRPGVWEYVRIHVEQLAVEELSTDEYLQAKEQLVGLGAEGEAVLTVDFEDFRPVSQRLKDESTIGDGLTHLNRHLAGRIWTDLAAGRSQILEFLGLHRLDNQNLMLSNGNTDFDSLRQTVQYLGTLPRETPWAEFREDMRRRGFEPGWGNTAGRVRETMRLLMDLLDSPSPAALESFLDRIPMISNILIVSIHGWFAQDKVLGRPDTGGQVVWILDQARAIEREIRNRLRQQGVDVEPRILIATRLIPESDGTTCDQRLEPVHGAENVQILRVPFRYEDGRIHPHWISRFKVWPYLERYASDLEREVKAELGSRPDVIIGNYSDGNLVATLLSEKLGVTQVNFAHALEKSKYLYSDLHWPDHEQDHHFACQFTADLIAMNAADVIITSTYQEIAGNDREVGQYESHQDYTLPGLYRVENGIDVFDSKFNIISPGADPRTYFSYARTEERFSSLWPEIESLLFGREPGPDIRGVLEDRQKPIILSMARMDRIKNLSGLAELYGRSSRLRSLANLVIIGGHVDVQNSMDAEEREEIRRMHEIMDHYQLDGQMRWVGSQLDKTVVGELYRVVADGRGVFVQPALFEAFGLTVIEAMSSGLPVFATRHGGPLEIIEDGVSGFHIDPNDPEATAEKLADFLEAARERPKYWEEISDAALARVSERYTWERWAERLLTLWRCLGFWRFVLSRESQVMERYLQMFRHLQWRPLAHAVPME

SEQ ID NO: 1100 - protein, 793 aa, Artificial Sequence
  engineered sucrose synthase encoded in plasmid pA32918
MIEELRQQLLDSPRSWRAFLRHLVASQRDSWLHTDLQRACKTFREQPPEGYPEDIGWLADFVAHTQEAIFRDPWMVFAWRLRPGVWEYVRIHVEQLAVEELSTDEYLQAKEQLVGLGAEGEAVLTVDFEDFRPVSQRLKDESTIGDGLTHLNRHLAGRIWTDLAAGRSQILEFLGLHRLDNQNLMLSNGNTDFDSLRQTVQYLGTLPRETPWAEFREDMRRRGFEPGWGNTAGRVRETMRLLMDLLDSPSPAALESFLDRIPMISNILIVSIHGWFAQDKVLGRPDTGGQVVWILDQARALERELRNRLRQQGVDVEPRILIATRLIPESDGTTCDQRLEPVHGAENVQILRVPFRYEDGRIHPHWISRFKVWPYLERYASDLEREVKAELGSRPDVIIGNYSDGNLVATLLSEKLGVTQINFAHALEKSKYLYSDLHWPDHEQDHHFACQFTADLIAMNAADIIITSTYQEIAGNDREVGQYESHQDYTLPGLYRVENGIDVFDSKFNIISPGADPRTYFSYARTEERFSSLWPEIESLLFGREPGPDIRGVLEDRQKPIILSMARMDRIKNLSGLAELYGRSSRLRSLANLVIIGGHVDVQNSMDAEEREEIRRMHEIMDHYQLDGQMRWVGSQLDKTVVGELYRVVADGRGVFVQPALFEAFGLTVIEAMSSGLPVFATRHGGPLEIIEDGVSGFHIDPNDPEATAEKLADFLEAARERPKYWEEISDAALARVSERYTWERWAERWLTLVRCWGFWRFVLSRESQVMERYLQMFRHLQWRPLAHAVPME

SEQ ID NO: 1101 - protein, 793 aa, Artificial Sequence
  engineered sucrose synthase encoded in plasmid pA32922
MIEELRQQLLDSPRSWRAFLRHLVASQRDSWLHTDLQRACKTFREQPPEGYPEDIGWLADFVAHTQEAIFRDPWMVFAWRLRPGVWEYVRIHVEQLAVEELSTDEYLQAKEQLVGLGAEGEAVLTVDFEDFRPVSQRLKDESTIGDGLTHLNRHLAGRIWTDLAAGRSQILEFLGLHRLDNQNLMLSNGNTDFDSLRQTVQYLGTLPRETPWAEFREDMRRRGFEPGWGNTAGRVRETMRLLMDLLDSPSPAALESFLDRIPMISNVLIVSIHGWFAQDKVLGRPDTGGQVVFILDQARALEREMRNRLRQQGVDVEPRILIATRLIPESDGTTCDQRLEPVHGAENVQILRVPFRYEDGRIHPHWISRFKVWPYLERYASDLEREVKAELGSRPDAIIGNYSDGNLVATLLSEKLGVTQINIAHALEKSKYLYSDLHWPDHEQDHHFACQFTADLIAMNAADAIVTSTYQEIAGNDREVGQYESHQDYTLPGLYRVENGIDVFDSKFNIISPGADPRTYFSYARTEERFSSLWPEIESLLFGREPGPDIRGVLEDRQKPIILSMARMDRIKNLSGLAELYGRSSRLRSLANLVIIGGHVDVQNSMDAEEREEIRRMHEIMDHYQLDGQMRWVGSQLDKTVVGELYRVVADGRGVFVQPALFEAFGLTVIEAMSSGLPVFATRHGGPLEIIEDGVSGFHIDPNDPEATAEKLADFLEAARERPKYWEEISDAALARVSERYTWERYAERLMTLIRCMGFWRFVLSRESQVMERYLQMFRHLQWRPLAHAVPME

SEQ ID NO: 1102 - protein, 793 aa, Artificial Sequence
  engineered sucrose synthase encoded in plasmid pA32923
MIEELRQQLLDSPRSWRAFLRHLVASQRDSWLHTDLQRACKTFREQPPEGYPEDIGWLADFVAHTQEAIFRDPWMVFAWRLRPGVWEYVRIHVEQLAVEELSTDEYLQAKEQLVGLGAEGEAVLTVDFEDFRPVSQRLKDESTIGDGLTHLNRHLAGRIWTDLAAGRSQILEFLGLHRLDNQNLMLSNGNTDFDSLRQTVQYLGTLPRETPWAEFREDMRRRGFEPGWGNTAGRVRETMRLLMDLLDSPSPAALESFLDRIPMISNVLIVSIHGWFAQDKVLGRPDTGGQVVYILDQARALERELRNRLRQQGVDVEPRILIATRLIPESDGTTCDQRLEPVHGAENVQILRVPFRYEDGRIHPHWISRFKVWPYLERYASDLEREVKAELGSRPDLIIGNYSDGNLVATLLSEKLGVTQMNIAHALEKSKYLYSDLHWPDHEQDHHFACQFTADLIAMNAADVIVTSTYQEIAGNDREVGQYESHQDYTLPGLYRVENGIDVFDSKFNIISPGADPRTYFSYARTEERFSSLWPEIESLLFGREPGPDIRGVLEDRQKPIILSMARMDRIKNLSGLAELYGRSSRLRSLANLVIIGGHVDVQNSMDAEEREEIRRMHEIMDHYQLDGQMRWVGSQLDKTVVGELYRVVADGRGVFVQPALFEAFGLTVIEAMSSGLPVFATRHGGPLEIIEDGVSGFHIDPNDPEATAEKLADFLEAARERPKYWEEISDAALARVSERYTWERYAERLATLARCAGFWRFVLSRESQVMERYLQMFRHLQWRPLAHAVPME

SEQ ID NO: 1103 - protein, 793 aa, Artificial Sequence
  engineered sucrose synthase encoded in plasmid pA32930
MIEELRQQLLDSPRSWRAFLRHLVASQRDSWLHTDLQRACKTFREQPPEGYPEDIGWLADFVAHTQEAIFRDPWMVFAWRLRPGVWEYVRIHVEQLAVEELSTDEYLQAKEQLVGLGAEGEAVLTVDFEDFRPVSQRLKDESTIGDGLTHLNRHLAGRIWTDLAAGRSQILEFLGLHRLDNQNLMLSNGNTDFDSLRQTVQYLGTLPRETPWAEFREDMRRRGFEPGWGNTAGRVRETMRLLMDLLDSPSPAALESFLDRIPMISNVTIVSIHGWFAQDKVLGRPDTGGQVVYILDQARALEREMRNRLRQQGVDVEPRILIVTRLIPESDGTTCDQRLEPVHGAENVQILRVPFRYEDGRIHPHWISRFKVWPYLERFASDAEREIKAELGSRPDLIIGNYSDGNLVATLLSEKLGVTQCNIAHALEKSKYLYSDLHWPDHEQDHHFACQFTADLIAMNAADIIVTSTYQEIAGNDREVGQYESHQDYTLPGLYRVENGIDVFDSKFNIVSPGADPRTYFSYARTEERFSSLWPEIESLLFGREPGPDIRGVLEDRQKPIILSMARMDRIKNLSGLAELYGRSSRLRSLANLVIIGGHVDVQNSMDAEEREEIRRMHEIMDHYQLDGQMRWVGSQLDKTVVGELYRVVADGRGVFVQPALFEAFGLTVIEAMSSGLPVFATRHGGPLEIIEDGVSGFHIDPNDPEATAEKLADFLEAARERPKYWEEISDAALARVSERYTWERYAERLMTIARCFGFWRFVLSRESQVMERYLQMFRHLQWRPLAHAVPME

SEQ ID NO: 1104 - protein, 793 aa, Artificial Sequence
  engineered sucrose synthase encoded in plasmid pA32932
MIEELRQQLLDSPRSWRAFLRHLVASQRDSWLHTDLQRACKTFREQPPEGYPEDIGWLADFVAHTQEAIFRDPWMVFAWRLRPGVWEYVRIHVEQLAVEELSTDEYLQAKEQLVGLGAEGEAVTTWDLEDLRPVSQRLKDESTIGDGLTHLNRHLAGRIWTDLAAGRSQILEFLGLHRLDNQNLMLSNGNTDFDSLRQTVQYLGTLPRETPWAEFREDMRRRGFEPGWGNTAGRVRETMRLLMDLLDSPSPAALESFLDRIPMISNVLIVSIHGWFAQDKVLGRPDTGGQVVYILDQARALEREMRNRLRQQGVDVEPRILIATRLIPESDGTTCDQRLEPVHGAENVQILRVPFRYEDGRIHPHWISRFKVWPYLERYASDLEREVKAELGSRPDLIIGNYSDGNLVATLLSEKLGVTQCNIAHALEKSKYLYSDLHWPDHEQDHHFACQFTADWIAMNAADIIVTSTYQEIAGNDREVGQYESHQDYTLPGLYRVENGVDVFDSKFNIVSPGADPRTYFSYARTEERFSSLWPEIESLLFGREPGPDIRGVLEDRQKPIILSMARMDRIKNLSGLAELYGRSSRLRSLANLVIIGGHVDVQNSMDAEEREEIRRMHEIMDHYQLDGQMRWVGSQLDKTVVGELYRVVADGRGVFVQPALFEAFGLTVIEAMSSGLPVFATRHGGPLEIIEDGVSGFHIDPNDPEATAEKLADFLEAARERPKYWEEISDAALARVSERYTWERYAERLMTIARCFGFWRFVLSRESQVMERYLQMIRHLQWRPLAHAVPME

SEQ ID NO: 1105 - protein, 793 aa, Artificial Sequence
  engineered sucrose synthase encoded in plasmid pA32579
MIEVLRQQLLDHPRSWRAFLRHLVASQRGLWLHTDLQHACKTFREQPPEGYPEDSGPLADFIAHCQEAIFLDPWMVFAWRLRPGVWEYVRIHVEQLAVEELSVDEYLQAKEQLVDGGAEGEAVLTVDFEDFRPVSQRLKDESTIGDGLTHLNRHLAGRIWTDLAEGRSAILEFLRLHRLDGQNLMLSDRITDFDSLRQTLQYLGTLPPETPWAEFREDMRRMGFEPGWGNTAGRVRETMRLLMDLLDSPSPAALESFLDRIPMISNVLIVSIHGYFAQDNVLGRPDTGGQVVYILDQARALEREMRNRLRQQGVDVEPRILIATRLIPESDGTTCDQRLEPVHGAEHVWILRVPFRNEDGRIHPHWISRFKVWPYLERYAEDLEREVKAELGGRPDLIIGNYSDGNLVATILSEKLGVTQCNIAHALEKTKYPGSDLYWKKYEQDYHFACQFTADLIAMNAADIIVTSTYQEIAGNDREVGQYESHQDYTLPGLYRVENGIDVFDPKFNIVSPGADPSIYFSYSRKERRFSSLWPEIESLLFGREPGPDIRGVLEDPQKPIILSVARMDRIKNLSGLAELYGRSARLRSLANLVIIGGHVDVQASMDAEEREEIRRMHEIMDRYQLDGQMRWVGSHLDKRRVGELYRVVADGRGVFVQPALFEAFGLTVIEAMSSGLPVFATRHGGPLEIIEDGVSGFHIDPNDPEAVAEKLADFFEAAREDPKYWEEISQAALARVSERYTWERYAERLMTIARCFGFWRFVTSRESQVMERYLQMFRHLQWRPLAHAVPME

SEQ ID NO: 1106 - protein, 793 aa, Artificial Sequence
  engineered sucrose synthase encoded in plasmid pA32581
MIEVLRQQLLDHPNAWYAFLRHLVASQRGLWLHTDLQHACKTFREQPPEGYLEDSGPLADFIAHCQEAIFLDPWMVFAWRLRPGVWEYVRIHVEQLAVEELSVDEYLQAKEQLVDGGAEGEAVLTVDFEDFRPVSQRLKDESTIGNGLTHLNRHLAGRIWTDLAEGRSALLEFLRLHRLDGQQLMLSDRITDFDSLRQTLQYLGTLPPETPWAEFREDMRRMGFEPGWGNTAGRVRETMRLLMDLLDSPSPAALEKFLDRIPMISNVLIVSIHGYFAQDNVLGRPDTGGQVVYILDQARALEREMRNRLRQQGVDVEPRILIATRLIPEADGTTCDQRLEPVHGAEHVWILRVPFRNEDGRILPHWISRFKVWPYLERYAEDLEREVKAELGGRPDLIIGNYSDGNLVATILSEKLGVTQCNIAHALEKTKYPGSDLYWKDYEQQYHFACQFTADLIAMNAADIIITSTYQEIAGNDREVGQYESHQDYTLPGLYRVENGIDVFDPKFNIVSPGADPSIYFSYSRKERRFSSLWPEIESLLFGREPGPDIRGVLEDPSKPIILSVARMDRIKNLSGLAELYGRSARLRSLANLVIIGGHVDVQASMDAEEREEIRRMHEIMDRYQLDGQMRWVGSHLDKRRVGELYRVVADTRGVFVQPALFEAFGLTVIEAMSSGLPVFATRHGGPLEIIEDGVSGFHIDPNDPEAVAEKLADFFEKAREDPKYWEEISQAALARVEERYTWERYAERLMTIARCFGFWKFVTSRESQVMERYLQMFRHLQWRPLAHAVPME

SEQ ID NO: 1107 - protein, 793 aa, Artificial Sequence
  engineered sucrose synthase encoded in plasmid pA32583
MIEVLRQQLKDNPNSLYAFLRHYVASQRGIWLHHDLQHELKTFREQPPNGYPKDIGALAEFIKHCQEAIFLDPWMYFAWRLRPGVWEYVRIHVEQLVVEELSVDEYLQAKEELVDGGPEGEAVLTVDFEDFRRVSQRLKDESTIGNGLQHLNRHLAGRIWTDLKEGREALLEFLRLHRLDGQQLMLSDRIQDFDSLRQALQYLGTLPPDTPWSEFREEMRRRGFEPGWGDTAGRVRETMRLLMDLLDSPSPAALEKFLARIPMISNVLIVSIHGWFGQDNVLGRPDTGGQVVYILDQARALEREMRQRLKEQGVDVEPRILIATRLIPEADGTTCDQRLEPVHGTEHVHILRVPFRYEDGEIHPHWISRFKVWPYLERFAEDLEREVLAELGGRPDLIIGNYSDGNLVATLLSEKLGVTQCNIAHALEKTKYPGSDLYWRKYEEQYHFACQFTADLIAMNAADIIITSTYQEIAGNDREVGQYESHQAYTLPGLYRVVNGIDVFDPKFNIVSPGADPSIYFPYSRKEERLTSLHPEIEELLYGREPGPDHRGVLEDPSKPIIFSVARMDRIKNLSGLAEWYGRSPRLRSLANLVIIGGHVDVQKSMDREEREEIRRMHEIMDRYNLDGQMRWIGAHLDKRRVGELYRVVADRRGVFVQPALFEAFGLTVIEAMASGLPVFATRHGGPAEIIEDGVSGFHIDPNDPDAVAEKLADFFERAREDPKYWEEISQAALQRVEERYTWERYAERLMTIARVYGFWKFVSSRERQVTRRYLQMFRHLQWRPLAHAVPME

SEQ ID NO: 1108 - protein, 793 aa, Artificial Sequence
  engineered sucrose synthase encoded in plasmid pA32585
MIEVLRQQLKDNPNSLRAFLRHYVASQRGIWLHTDLQHELKTFYEQPPNGYPEDIGALADFIRHCQEAIFLDPWMYFAWRLRPGVWEYVRIHVEQLAVEELSTDEYLQAKEELVDGGPEGEAVLTVDFEDFRRVSQRLKDESTIGNGLQHLNRHLAGRIWTDLKRGRSALLEFLRLHRLDGQQLMLSDRIQDFDSLRQAVQYLGTLPPETPWAEFREDMRRRGFEPGWGNTAGRVRETMRLLMDLLDSPSPAALEKFLARIPMISNVLIVSIHGWFAQDNVLGRPDTGGQVVYILDQARALEREMRERLRQQGVDVEPRILIATRLIPEADGTTCDQRLEPVHGTEHVHILRVPFRYEDGRIHPHWISRFKVWPYLERYARDLEREVLAELGGRPDLIIGNYSDGNLVATILSEKLGVTQCNIAHALEKTKYPGSDLYWRKYEEQYHFACQFTADLIAMNAADIIITSTYQEIAGNDREVGQYESHQAYTLPGLYRVVNGIDVFDPKFNIVSPGADPSIYFPYTRKEERFSSLHPEIEELLFGREPGPDHRGVLEDPSKPIILSVARMDRIKNLSGLAEWYGRSPRLRSLANLVIIGGHVDVQKSMDAEEREEIRRMHEIMDRYQLDGQMRWVGAHLDKRRVGELYRVVADRRGVFVQPALFEAFGLTVIEAMSSGLPVFATRHGGPLEIIEDGVSGFHIDPNDPDAVAEKLADFFERAREDPKYWEEISQAALQRVEERYTWERYAERLMTIARVYGFWRFVSSRERQVMRRYLQMFRHLQWRPLAHAVPME

SEQ ID NO: 1109 - protein, 793 aa, Artificial Sequence
  engineered sucrose synthase encoded in plasmid pA32587
MIEVLRQQLLDSPRSWHAFLRHLVASQRGFWLHTDLQHACKTFREQPPEGYPEDIGPLADFIAHCQEAIFRDPWMVFAWRLRPGVWEYVRIHVEQLAVEELSVDEYLQAKEQLVGGGAEGEAVLTVDFEDFRPVSQRLKDESTIGNGLTHLNRHLAGRIWTDLAAGRSAILEFLRLHRLDGQQLMLSDRITDFDSLRQTLQYLGTLPRETPWAEFREDMRRRGFEPGWGNTAGRVRETMRLLMDLLDSPSPAALESFLARIPMISNVLIVSIHGWFAQDNVLGRPDTGGQVVYILDQARALEREMRRRLRQQGVDVEPRILIATRLIPESDGTTCDQRLEPVHGAENVWILRVPFRYEDGRIHPHWISRFKVWPYLERYARDLEREVKAELGGRPDLIIGNYSDGGLVATILSEKLGVTQCNIAHALEKTKYPGSDLYWPKYEQDHHFACQFTADLIAMNAADIIVTSTYQEIAGNDREVGQYESHQDYTLPGLYRVENGIDVFDPKFNIVSPGADPSIYFSYSRKERRFSSLWPEIESLLFGREPGPDIRGVLEDPQKPIILSVARMDRIKNLSGLAELYGRNPRLRSLANLVIIGGHVDVQASMDAEEREEIRRMHEIMDRYQLDGQMRWVGSHLDKRVVGELYRVVADKRGVFVQPALFEAFGLTVIEAMSSGLPVFATRHGGPLEIIEDGVSGFHIDPNDPEAVAEKLADFFEAARERPKYWEEISQAALARVSERYTWERYAERLMTIARVFGFWRFVSSRERQVMERYLQMFRHLQWRPLAHAVPME

SEQ ID NO: 1110 - protein, 793 aa, Artificial Sequence
  engineered sucrose synthase encoded in plasmid pA32597
MIEVLRQQLLDHPRSWRAFLRHLVASQRGLWLHTDLQHECETFREQPPEGYPEDIGWLADFIAHCQEAIFLDPWMYFAWRLRPGVWEYVRIHVEQLAVEELSTDEYLQAKEQLVGGGAEGEAVLTVDFEDFRPVSQRLKDESTIGDGLTHLNRHLAGRIWGDLAEGRSAILEFLRLHRLDGQNLMLSDRITDFDSLRQALQYLGTLPPETPWAEFREDMRRRGFEPGWGNTAQRVRETMRLLMDLLDSPSPAALESFLDRIPMISNVLIVSIHGWFAQDNVLGRPDTGGQVVYILDQARALEREMRNRLRQQGVDVEPRILIATRLIPEADGTTCDQRLEPVHGTENVWILRVPFRYEDGRIHPHWISRFKVWPYLERYARDLEREVKAELGGRPDLIIGNYSDGNLVATILSEKLGVTQCNIAHALEKTKYPGSDLHWPKYEQDYHFACQFTADLIAMNAADIIVTSTYQEIAGNDREVGQYESHQDYTLPGLYRVENGIDVFDPKFNIVSPGADPSIYFSYSRKEERFSSLWPEIESLLFGREPGPDIRGVLEDPSKPIILSVARMDRIKNLSGLAELYGRSARLRSLANLVIIGGHVDVQASMDAEEREEIRRMHEIMDRYQLDGQMRWVGSHLDKRVVGELYRYVADGRGVFVQPALFEAFGLTVIEAMSSGLPVFATRHGGPLEIIEDGVSGFHIDPNDPEAVAEKLADFLERARERPKYWEEISQAALARVSERYTWERYAERLMTIARVFGFWRFVSSRESQVMERYLQMFRHLQWRPLAHAVPME

SEQ ID NO: 1111 - protein, 793 aa, Artificial Sequence
  engineered sucrose synthase encoded in plasmid pA32599
MIEVLRQQLLDHPRSWRAFLRHLVASQRGMWLHTDLQHECKTFREQPPEGYPEDIGPLADFIAHCQEAIFRDPWMVFAWRLRPGVWEYVRIHVEQLAVEELSVDEYLQAKEQLVGGGAEGEAVLTVDFEDFRPVSQRLKDESTIGDGLTHLNRHLAGRIWTDLAAGRSAILEFLRLHRLDGQQLMLSDRITDFDSLRQAVQYLGTLPRETPWAEFREDMRRRGFEPGWGNTAGRVRETMRLLMDLLDSPSPAALESFLDRIPMISNVLIVSIHGWFAQDNVLGRPDTGGQVVYILDQARALEREMRNRLRQQGVDVEPRILIATRLIPESDGTTCDQRLEPVHGTENVWILRVPFRYEDGRIHPHWISRFKVWPYLERYARDLEREVKAELGGRPDLIIGNYSDGNLVATILSEKLGVTQCNIAHALEKSKYPGSDLYWKKYEQDYHFACQFTADLIAMNAADIIVTSTYQEIAGNDREVGQYESHQDYTLPGLYRVENGIDVFDSKFNIVSPGADPSIYFSYSRHEERFSSLWPEIESLLFGREPGPDIRGVLEDPQKPIILSVARMDRIKNLSGLAEWYGRSARLRSLANLVIIGGHVDVQASMDAEEREEIRRMHEIMDRYQLDGQMRWVGSHLDKRRVGELYRVVADQRGVFVQPALFEAFGLTVIEAMSSGLPVFATRHGGPLEIIEDGVSGFHIDPNDPEAVAEKLADFFERARERPKYWEEISQAALARVSERYTWERYAERLMTIARCFGFWRFVSSRERQVMERYLQMFRHLQWRPLAHAVPME

SEQ ID NO: 1112 - protein, 793 aa, Artificial Sequence
  engineered sucrose synthase encoded in plasmid pA32610
MIEVLRQQLLDHPREWRAFLRHYVASQRGLWLHHDLQHECETFREEPPEGYPEDQGPFAEFVKHCQEAIFLDPWMVFAWRLRPGVWEYVRIHVEQLAVEELSVDEYLQAKEELVDGGAEGEAVLEVDFEDFNRTSQRLKDESTIGNGLQHLNRHLAGRIWTDLKEGRSALLEFLRLHRLDGQQLMLSDRIQDFDSLRQALQYLGTLPPDTPWSEFEEDMRRRGFEPGWGDTAGRVRETMRLLMDLLDSPSPAALEKFLDRIPMISNVLIVSIHGWFAQDNVLGRPDTGGQVVYILDQARALEREMRKRLKQQGVDVEPRILIATRLIPEADGTTCDQRLEPVHGTEHVWILRVPFRYENGRIHPHWISRFKVWPYLERFARDLEREVLAELGGRPDLIIGNYSDGNLVATLLSEKLGVTQCNIAHALEKTKYPGSDLYWKKYEEQYHFACQFTADLIAMNAADIIITSTYQEIAGTDDEVGQYESHQDYTLPGLYRVVNGIDVFDPKFNIVSPGADPSIYFPYSRKEERLSSLHPEIEELLYGREPGPDHRGVLEDPSKPIILSVARMDRIKNLSGLAEWYGRNPRLRSLANLVIIGGHVDVQKSNDREEREEIRRMHEIMDRYNLDGQMRWVGAHLDKRRVGELYRVVADRRGVFVQPALFEAFGLTVIEAMASGLPVFATRHGGPLEIIEDGVSGFHIDPNDPDAVAEKLADFFERARERPKYWEKISQAALRRVEERYTWELYAERLMTIARVYGFWRFVSSRERQVTRRYLQMFRHLQWRPLAHAVPME

SEQ ID NO: 1113 - protein, 793 aa, Artificial Sequence
  engineered sucrose synthase encoded in plasmid pA32613
MIEVLRQQLLDHPREWRAFLRHLVASQRGLWLHHDLQHECKTFREEPPEGYPEDQGPLADFIAHCQEAIFLDPWMVFAWRLRPGVWEYVRIHVEQLAVEELSVDEYLQAKEQLVNGGAEGEAVLTVDFEDFRRVSQRLKDESTIGDGLEHLNRHLAGRIWTDLKEGRSAILEFLRLHRLDGQNLMLSDRITDFDSLRQTLQYLGTLPPETPWAEFREDMRRRGFEPGWGNTAGRVRETMRLLMDLLDSPSPAALEKFLDRIPMISNVLIVSIHGWFAQDNVLGRPDTGGQVVYILDQARALEREMRNRLRQQGVDVEPRILIATRLIPEADGTTCDQRLEPVHGTEHVWILRVPFRYEDGRIHPHWISRFKVWPYLERYARDLEREVKAELGGRPDLIIGNYSDGNLVATILSEKLGVTQCNIAHALEKTKYPGSDLYWKKYEQQYHFACQFTADLIAMNAADIIITSTYQEIAGNDDEVGQYESHQDYTLPGLYRVVNGIDVFDPKFNIVSPGADPSIYFPYSRKEERFSSLWPEIESLLFGREPGPDHRGVLEDPDKPIILSVARMDRIKNLSGLAEWYGRNPRLRSLANLVIIGGHVDVQKSMDAEEREEIRRMHEIMDRYQLDGQMRWVGSHLDKRRVGELYRVVADRRGVFVQPALFEAFGLTVIEAMSSGLPVFATRHGGPLEIIEDGVSGFHIDPNDPEAVAEKLADFFEKARERPKYWEEISQAALARVSERYTWERYAERLMTIARVFGFWRFVTSRERQVMRRYLQMFRHLQWRPLAHAVPME

SEQ ID NO: 1114 - protein, 793 aa, Artificial Sequence
  engineered sucrose synthase encoded in plasmid pA32617
MIEVLRQQLLDHPNAWRAFLRHYVASQRGLWLHHDLQHELEADREQPPEGYPKDNGPLAEFIKHCQEAIFIDPWMVFAWRLRPGVWEYVRIHVEQLAVEELSVDEYLQFKEQLVNGGAEGEAVLTVDFEDFRRSSQRLKDESTIGNGVQHLNRHLAGRIWGDLKEGRERLLEFLRLHRHDGQQLMLSDRIQDFDSLRQALQYLGTLPRDTPWSEFEEEMRRLGFEPGWGDTAERVRETMRLLMDLLDSPSPATLEKFLDRIPMISNVLIVSIHGWFAQDNVLGRPDTGGQVVYILDQARALEREMRDRLRQQGVDVEPRILIATRLIPESDGTTCDQRLEPVHGTEHVHILRVPFRYEDGRIHPHWISRFKVWPYLERFARDLEREVLAELGGRPDLIIGNYSDGNLVATILSEKLGVTQCNIAHALEKTKYPGSDLYWKKYEEQYHFACQFTADLIAMNAADIIITSTYQEIAGTDNEVGQYESHQDYTLPGLYRVVHGIDVFDPKFNIVSPGADPSIYFPYSRKERRFSSLHPEIEELLFGREPGPDIRGVLEDPSKPIILSVARMDRIKNLSGLAEWYGRSARLRELANLVIIGGHIDVEKSNDREEREEIRRMHEIMDRYQLDGQMRWIGSHLDKRVVGELYRYVADRRGVFVQPALFEAFGLTVIEAMASGLPVFATRHGGPLEIIEDGVSGFHIDPNDPDAVAEKLADFFERAREDPDYWEEISQAALQRVEERYTWERYAERLMTLARCYGFWRFVTKRERQVTRRYLQMFRHLQWRPLAHAVPME

SEQ ID NO: 1115 - protein, 793 aa, Artificial Sequence
  engineered sucrose synthase encoded in plasmid pA32619
MIEVLRQQLSDHPNSWRAFLRHLVASQRDFWLHTDLQDACKTFREQPPEGYPEDIGWLADFIAHCQEAIFRDPWMVFAWRLRPGVWEYVRIHVEQLAVEELSTDEYLQFKEQLVGGGAEGEAVLTVDFEDFRPVSQRLKDESTIGDGLTHLNRHLAGRLWTDLGKGRSAILEFLGLHRLDGQNLMLSDRNTDFDSLRQTLQYLGTLPRDTPWAEFREDMRRLGFEPGWGDTAGRVRETMRLLMDLLDSPSPAALESFLGRIPMISNVLIVSIHGWFAQDNVLGRPDTGGQVVYILDQARALEREMRNRLRQQGVDVEPRILIATRLIPESDGTTCDQRLEPVHGTENVQILRVPFRYEDGRIHPHWISRFKVWPYLERYARDLEREVKAELGGRPDLIIGNYSDGNLVATILSEKLGVTQCNIAHALEKSKYPGSDLYWPKYEQQYHFACQFTADLIAMNAADIIVTSTYQEIAGNDREVGQYESHQDYTLPGLYRVVNGIDVFDSKFNIVSPGADPSVYFPYTRHEKRFSSLWPEIESLLFGREPGPDHRGVLEDPQKPIILSVARMDRIKNLSGLAEWYGRSNRLRSLANLVIIGGHVDVQKSMDGEEREEIRRMHEIMDRYQLDGQMRWVGSHLDKNRVGELYRVVADGRGVFVQPALFEAFGLTVIEAMSSGLPVFATRHGGPLEIIEDGVSGFHIDPNHPEAVAEKLADFLEAARERPKYWEKISQAALARVSERYTWERYAERLMTIARCFGFWRFVLSRESQVMERYLQMFRHLQWRPLAHAVPME

SEQ ID NO: 1116 - protein, 793 aa, Artificial Sequence
  engineered sucrose synthase encoded in plasmid pA32621
MIEVLRQQLSDHPNSWRAFLRHLVASQRDIWLHHDLQDACKTFREQPPEGYPEDIGPLADFIAHCQEAIFRDPWMVFAWRLRPGVWYYVRIHVEQLAVEELSTDEYLQFKEQLVGLGAEGEAVLTVDFEDFRPGFQRLKDESTIGNGLEHLNRHLAGRMWTDLAAGDSALLEFLGLHRLDGQQLMLSDGNTDFDSLRQTVQYLGTLPPETPWAEFREDMRRRGFEPGWGRTAGRVRETMRLLMDLLDSPSPAALESFLDRIPMISNVLIVSIHGWFAQDNVLGRPDTGGQVVYILDQARALEREMRNRLRQQGVDVEPRILIATRLIPESDGTTCDQRLEPVHGTENVWILRVPFRYEDGRIHPHWISRFKVWPYLERYARDLEREVLAELGGRPDLIIGNYSDGNLVATILSQKLGVTQCNIAHALEKSKYPGSDLHWPLYEQDYHFACQFTADLIAMNAADIIVTSTYQEIAGNDREVGQYESHQDYTLPGLYRVVNGIDVFDPKFNIVSPGADPSIYFPYTRHEERFSSLHPEIESLLFGREPGPPIRGVLEDPDKPIILSVARLDRIKNLSGLAELYGRSARLRELANLVIIGGHVDVQASMDAEEREEIRRMHEIMDRYQLDGQMRWVGSHLDKRVVGELYRYVADKRGAFVQPALFEAFGLTVIEAMSSGLPVFATRHGGPLEIIEDGVSGFHIDPNDPEAVAEKIADFLEAARERPKYWEEISQAALARVEERYTWERYAERLMTLARVYGFWRFVLSRESQVMRRYLQMFRHLQWRPLAHAVPME

SEQ ID NO: 1117 - protein, 793 aa, Artificial Sequence
  engineered sucrose synthase encoded in plasmid pA32627
MIEVLRQQLLDNPNEWRAFLRHLVASQRGSWLHHDLWDACKTFREQPPEGYPEDIGWLAEFIAHCQEAIFRDPWFVFAWRLRPGVWEYVRIHVEQLAVEELSTDEYLQFKEQLVTGGAEGEAVLEVDFEDFRPGFQRLKDESTIGDGLTHLNRHLAGRIWTDLGAGRSAILEFLSLHRLDGQQLMLNNRITDFDSLRQALQYLGTLPRDTPWSEFREDMRRMGFEPGWGDTAGRVRETMRLLMDLLDSPSPAALEKFLDRIPMISNVLIVSIHGWFGQDNVLGRPDTGGQVVYILDQARALEREMRNRLRQQGVDVEPRILIATRLIPESRGTTCDQRLEPVHGAENVHILRVPFRYEDGRIHPHWISRFKVWPYLERYARDLEREVKAELGGRPDLIIGNYSDGNLVATILSEKLGVTQCNIAHALEKSKYPGSDLYWPKYEQKYHFACQFTADLIAMNAADIIVTSTYQEIAGNDREVGQYESHQAYTLPGLYRVVNGIDVFDPKFNIVSPGADPSIYFSYTRTEKRFSSLHPEIERLLFGREPGPPIRGVLEDPDKPIILSVARMDRIKNLSGLAEWYGRSARLRELANLVIIGGHVDVQKSSDGEEQEEIRRMHEIMDRYQLDGQMRWVGSHLDKRVVGELYRYVADRRGVFVQPALFEAFGLTVIEAMSSGLPVFATRHGGPLEIIEDGVSGFHIDPNHPDAVAEKLADFLEAAREDPKYWEKISQAALQRVEERYTWERYAERLMTIARVYGFWKFVLKRERQVMRRYLQMFRHLQWRPLAHAVPME

SEQ ID NO: 1118 - protein, 793 aa, Artificial Sequence
  engineered sucrose synthase encoded in plasmid pA32631
MIEVLRQQLSDHPNSWRAFLRHLVASQRDSWLHTDLQDAFDTFREQPPEGYPEDIGPLAEFIAHCQEAIFRDPWMVFAWRLRPGVWEYYRIHVEQLAVEELSTSEYLQFKEELVGGGAEGEAVLTVDFEDFRPGSQRLKDESTIGDGLEHLNRHLAGRIWTDLGKGDYAILEFLGLHRLDGQQLMLSDRFTDFDSLRQTLQYLGKLPRDTPWAEFREDLQRLGFEPGWGDTAERVRETMRLLMDLLDSPSPAALEKFLARIPMISNVLIVSIHGWFAQDNVLGRPDTGGQVVYILDQARALEREMRERLRQQGVDVEPRILIATRLIPEADGTTCDQRLEPVHGAEHVWILRVPFRYEDGRIHPHWISRFKVWPYLERYARDLEREVKAELGGRPDLIIGNYSDGNLVATILSEKLGVTQCNIAHALEKSKYPGSDLHWKRYEQQYHFACQFTADLIAMNAADIIVTSTYQEIAGNDHEVGQYESYQDYTLPGLYRVVNGIDVFDPKFNIVSPGADPSIYFSYSETEKRLTSLHPEIEKLLFGPDPGPDHRGVLEDPDKPIILSVARLDRIKNLSGLAEWYGRNARLRELANLVIIGGHVDVQKSTDGEEREEIKRMHEIMDKYQLDGQMRWVGSHLDKNRVGELYRYVADGRGVFVQPALFEAFGLTVIEAMSSGLPVFATRHGGPLEIIEDGVSGFHIDPNHGEAVAEKLADFLEKARERPKYWEKISQAALQRVEERYTWERYAERLMTIARVFGFWRFVTKRESQVMERYLQMFRHLQWRPLAHAVPME

SEQ ID NO: 1119 - protein, 793 aa, Artificial Sequence
  engineered sucrose synthase encoded in plasmid pA32633
MIEVLRQQLLDNPNSWRAFLRHLVASGRDLWLHTDLQDACETFREQPPEGYPEDIGWFADFIAHCQEAIFRDPWMVFAWRLRPGVWEYVRIHVEQLAVEELSTDEYLQAKEQLVGLGAEGEAVLTVDFEDFRPVSQRLKDESTIGDGLEHLNRHLAGRIWTDLAAGRSKILEFLGLHRLDGQQLMLSDRITDFDSLRQTVQYLGTLPEETPWAEFREDMRRRGFEPGWGDTAGRVRETMRLLMDLLDSPSPAALEKFLGRIPMISNVLIVSIHGWFAQDNVLGRPDTGGQVVYILDQARALEREMRNRLRQQGVDVEPRILIATRLIPESDGTTCDQRLEPVHGTENVWILRVPFRYEDGRIHPHWISRFKVWPYLERYARDLEREVLAELGGRPDLIIGNYSDGNLVATILSEKLGVTQCNIAHALEKSKYPGSDLYWPKYEQKYHFACQFTADLIAMNAADIIVTSTYQEIAGNDREVGQYESHQDYTLPGLYRVVNGIDVFDPKFNIVSPGADPSIYFSYTRTEERFSSLHPEIEELLFGREPGPDIRGVLEDPQKPIILSVARMDRIKNLTGLAELYGRSARLRELANLVIIGGHVDVQKSTDAEEREEIRRMHEIMDRYQLDGQMRWVGSHLDKRVVGELYRYVADGRGVFVQPALFEAFGLTVIEAMSSGLPVFATRHGGPLEIIEDGVSGFHIDPNDPEAVAEKLADFLEAARERPKYWEKISQAALQRVEERYTWERYAERLMTIARCYGFWRFVLSRESQVMRRYLQMFRHLQWRPLAHAVPME

SEQ ID NO: 1120 - protein, 793 aa, Artificial Sequence
  engineered sucrose synthase encoded in plasmid pA32637
MIEVLRQQLSDHPNAWHAFLRHLVASQRGIWQHHDLQDALEDFREQPPEGYPEGIGALARFIEHCQEAIFRDPWMVFAWRLRPGVWEYVRIHVEQLTVEELSTDEYLQFKEQLVGGGPEGEAVLEVDFEDFNRGFQRMKDESTIGNGLQHLNRHLAGRLWTDLAGGRSKLLEFLGVHRLDGQQLMLSDRITDFDSLRQALQYLGTLPDDTPWSEFEEDMQRMGFEPGWGDTAGRVRETMRLLMDLLDSPSPAALEKFLARIPMISNVLIVSIHGWFAQDNVLGRPDTGGQVVYILDQARALEREMRERLRQQGVDVEPRILIATRLIPDSDGTTCDQRLEPVHGAENVWILRVPFRYEDGEIHPHWISRFKVWPYLERYAEDLEREVLAELGGRPDLIIGNYSDGNLVASLLSEKLGVTQCNIAHALEKSKYPGSDLYWPKYEQKYHFACQFTADLIAMNAADIIVTSTYQEIAGNDHSVGQYESYQAFTLPGLYRVVHGIDVFDPKFNIVSPGADPSIYFSYSRTEERLTSLHPEIEKLLFGREPGPDIRGVLEDPDKPIILSVARMDRIKNLTGLAEWYGRNPRLRELANLVIIGGHVDVQKSTDREEREEIRRMHEIMDRYQLDGQMRWIGSHLDKRVVGELYRYVADTRGVFVQPALFEAFGLTVIEAMASGLPVFATRHGGPLEIIEHGVSGFHIDPNHPDAVAEKLADFLEAARNDPKYWEEISQAALKRVYERYTWERYAERLMTIARVYGFWRFVSSRERQVTERYLQMFRHLQWRPLAHAVPME

SEQ ID NO: 1121 - protein, 793 aa, Artificial Sequence
  engineered sucrose synthase encoded in plasmid pA32641
MIEVLRQQLLDHPEEWRAFLRHLVASQRDFWLHHDLQDAFETFREQPPEGYPEDIGPLADFIAHCQEAIFRDPWMYFAWRLRPGVWEYVRIHVEQLAVEELSVDEYLQFKEQLVSGGAEGEAVLTVDFEDFRPGFQRLKDESTIGNGLQHLNRHLAGRIWHDLAKGRSAILEFLSLHRLDGQQLMLSDRITDFDSLRQTLQYLGTLPRETPWAEFREDMRRLGFEPGWGDTAGRVRETMRLLMDLLDSPSPAALEKFLARIPMISNVLIVSIHGWFAQDNVLGRPDTGGQVVYILDQARALEREMRERLRQQGVDVEPRILIATRLIPESDGTTCDQRLEPVHGAENVWILRVPFRYEDGRIHPHWISRFKVWPYLERYAEDLEREVLAELGGRPDLIIGNYSDGNLVATLLSEKLGVTQCNIAHALEKTKYPGSDLYWPKYEDQYHFACQFTADLIAMNAADIIVTSTYQEIAGNDREVGQYESHQAYTLPGLYRVVNGIDVFDSKFNIVSPGADPSVYFSYSRTERRFSSLHPEIERLLFGREPGPDIRGVLEDPDKPIILSVARMDRIKNLSGLAEWYGRSPRLRELANLVIIGGHVDVENSSDSEEREEIRRMHEIMDRYQLDGQMRWVGSHLDKRVVGELYRVVADTRGVFVQPALFEAFGLTVIEAMSSGLPVFATRHGGPLEIIEDGVSGFHIDPNHPEAVAEKLADFFERARERPKYWEEISQAALKRVEERYTWERYAERLMTLARVYGFWRFVSSRESQVMERYLQMFRHLQWRPLAHAVPME

SEQ ID NO: 1122 - protein, 793 aa, Artificial Sequence
  engineered sucrose synthase encoded in plasmid pA32647
MIEVLRQQLLQHPDSWRAFLRHLVASGRDFWLHHDLQDAFKTFREQPPEGYPEDIGVLADFIAHCQEAIFRDPWMVFAWRLRPGVWEYVRIHVEQLAVEELSTDEYLQFKEQLVNGGAEGEAVLTVDFEDFRPGFQRLKDESTIGNGLEHLNRHLAGRLWTDLGKGRSRLLEFLGLHRHDGQNLMLSNGNTDFDSLRQTVQYLGTLPRETPWAEFREDMRRMGFEPGWGDTAERVRETMRLLMDLLDSPSPAALESFLARIPMISNVLIVSPHGWFAQDKVLGRPDTGGQVVYILDQARALEREMRERLRQQGVDVEPRILIATRLIPESDGTTCDQRLEPVHGTENVHILRVPFRYEDGRIHPHWISRFKVWPYLERYARDLEREVLAELGGRPDLIIGNYSDGNLVATLLSEKLGVTQCNIAHALEKSKYPDSDLYWPKYEQDYHFACQFTADLIAMNAADIIITSTYQEIAGTDREVGQYESHQDYTLPGLYRVVNGIDVFDPKFNIVSPGADPSVYFPYSRHEERFSSLWPEIESLLFGREPGPDIRGVLSDPQKPIILSVARMDRIKNLTGLAEWYGRSPRLRELANLVIVGGHVDVQASNDAEEREEIRRMHEIMDRYQLDGQVRWLGSHLDKRRVGELYRYVADKRGVFVQPALFEAFGLTVIEAMSSGLPVFATRHGGPLEIIEHGVSGFHIDPNDPEAVAEKLADFLEAAREEPKYWEEISQAALARVEERYTWERYAERLMTLARVYGFWRFVLSRERQVTRRYLQMFRHLQWRPLAHAVPME

SEQ ID NO: 1123 - protein, 793 aa, Artificial Sequence
  engineered sucrose synthase encoded in plasmid pA32656
MIEELRQQLLDHPNSWYAFLRHLVASQRGIWLHTDLQRECKTFREQPPEGYPEDIGWLADFVAHTQEAIFLDPWMVFAWRLRPGVWEYVRIHVEQLAVEELSTDEYLQAKEQLVGGGAEGEAVLTVDFEDFRPVSQRLKDESTIGDGLTHLNRHLAGRIWTDLAQGRSQILEFLRLHRLDGQQLMLSNRITDFDSLRQTVQYLGTLPRETPWAEFREDMRRRGFEPGWGNTAGRVRETMRLLMDLLDSPSPAALEKFLDRIPMISNVLIVSIHGYFAQDNVLGRPDTGGQVVYILDQARALEREMRNRLRQQGVDVEPRILIATRLIPESDGTTCDQRLEPVHGAENVQILRVPFRYEDGRIHPHWISRFKVWPYLERYAEDLEREVKAELGGRPDLIIGNYSDGNLVATLLSEKLGVTQCNIAHALEKSKYLYSDLHWPDHEQDYHFACQFTADLIAMNAADIIVTSTYQEIAGNDREVGQYESHQDYTLPGLYRVENGIDVFDSKFNIVSPGADPRIYFPYSRTEERFSSLWPEIESLLFGREPGPDIRGVLEDRSKPIILSMARLDRIKNLSGLAEWYGRSSRLRSLANLVIIGGHVDVQNSMDAEEREEIRRMHEIMDEYQLDGQMRWVGSQLDKTRVGELYRVVADRRGVFVQPALFEAFGLTVIEAMSSGLPVFATRHGGPLEIIEDGVSGFHIDPNDPEATAEKLADFLERARERPKYWEEISDAALARVSERYTWERYAERLMTIARCFGFWRFVSSRERQVMERYLQMFRHLQWRPLAHAVPME

SEQ ID NO: 1124 - protein, 793 aa, Artificial Sequence
  engineered sucrose synthase encoded in plasmid pA32658
MIEELRQQLRDHPNSWYAFLRHLVASQRGIWLHTDLQRECKTFREPPPEGYPEDIGWLADFVAHTQEAIFLDPWMYFAWRLRPGVWEYVRIHVEQLAVEELSVEEYLQAKEELVDGGAEGEAVLTVDFEDFRPVSQRLKDESTIGNGLEHLNRHLAGRIWTDLAQGRSQLLEFLRLHRLDGQQLMLSDRITDFDSLRQAVQYLGTLPRDTPWSEFREDMRRRGFEPGWGDTAGRVRETMRLLMDLLDSPSPAALEKFLDRIPMISNVLIVSIHGYFAQDNVLGRPDTGGQVVYILDQARALEREMRERLRQQGVDVEPRILIATRLIPEADGTTCDQRLEPVSGAEYVQILRVPFRYEDGEIHPHWISRFKVWPYLERYAEDLEREVLAELGGRPDLIIGNYSDGNLVATLLSEKLGVTQCNIAHALEKTKYLYSDLYWKDHEQQYHFACQFTADLIAMNAADIIITSTYQEIAGNDNEVGQYESHQDYTLPGLYRVEHGIDVFDPKFNIVSPGADPRIYFPYSRTERRFSSLWPEIERLLFGREPGPDIRGVLEDRSKPIILSMARLDRIKNLSGLAEWYGRSSRLRSLANLVIIGGHVDVQNSMDAEEREEIRRMHEIMDEYQLDGQMRWIGSQLDKTRVGELYRVVADRRGVFVQPALFEAFGLTVIEAMSSGLPVFATRHGGPLEIIEDGVSGFHIDPNDPDATAEKLADFFERAREDPKYWEEISQAALQRVYERYTWERYAERLMTIARCFGFWRYVSKRERQVMRRYLQMFRHLQWRPLAHAVPME

SEQ ID NO: 1125 - protein, 793 aa, Artificial Sequence
  engineered sucrose synthase encoded in plasmid pA32673
MIEELRQQLLDHPREWYAFLRHYVASQRGMWLHHDLQHEFKAFREQPPEGYPEDIGWLAEFVQHTQEAIFRDPWMVFAWRERPGVWEYVRIHVEQLAVEELSVSEYLQAKEELVDGGAEGEAVLEVDFEDFRRNSQRLKDESTIGNGLQHLNRHLAGRLWTDLARGLEQLLDFLRLHRLDGQQLMLSDRIQDFDSLRQALQYLGTLPPDTPWSEFEEDMQRLGFEPGWGDTAGRVRETMRLLMDLLDSPSPAALEKFLDRIPMISNVLIVSIHGYFAQDNVLGRPDTGGQVVYILDQARALEREMRERLRQQGVDVEPRILIATRLIPEADGTTCDQRLEPVSGTEHVHILRVPFRYEDGRIHPHWISRFKVWPYLERFAEDLEREVLAELGGRPDLIIGNYSDGNLVATLLSEKLGVTQCNIAHALEKTKYLYSDLYWKDFEDQYHFACQFTADLIAMNAADIIVTSTYQEIAGTDNEVGQYESHQAYTLPGLYRVVNGIDVFDPKFNIVSPGADPRIYFSYTRKERRFSSLHPEIERLLYGREPGPEIRGVLEDRSKPIILTMARMDRIKNLTGLAEWYGRSSRLRELANLVIIGGHIDVGKSNDREEREEIRRMHEIMDEYNLDGQMRWIGAQLDKTRVGELYRVVADTRGVFVQPALFEAFGLTVIEAMASGLPVFATRHGGPLEIIEDGVSGFHIDPNDPDAAAEKLADFFERAREDPKYWEEISQAALQRVEERYTWERYAERLMTLARVYGFWRFVSKRERQVTRRYLQMFRHLQWRPLAHAVPME

SEQ ID NO: 1126 - protein, 793 aa, Artificial Sequence
  engineered sucrose synthase encoded in plasmid pA32677
MIEELRQQLSDSRNSWRAFLRRYVASQRGLWLHTQLWDELKTFREQPPEGYPYDKGWLAKFLRHTQEAIFRDPWMVFAWRERPGVWEYVRIHVEQLAVEELSVDEYLQAKEELVDGGAEGEAVLEVDFEDFRRTSQRLKDESTIGNGLQHLNRHLAGRLWTDLGAGREQILEFLRLHRLDGQQLMLSDRIQDFDSLRQALQYLGTLPRDTPWSEFEEEMRRLGFEPGWGDTAGRVRETMRLLMDLLDSPSPAALEKFLARIPMISNVLIVSIHGWFGQDNVLGRPDTGGQVVYILDQARALEREMRERLRQQGVDVEPRILIATRLIPEAKGTTCDQRLEPVSGTEHTHILRVPFRKEDGRIHPHWISRFKVWPYLERYAEDLEREVLAELGGRPDLIIGNYSDGNLVATLLSEKLGVTQCNIAHALEKTKYLYSDLYWKDHEDQYHFACQFTADLIAMNAADIIITSTYQEIAGTDNEVGQYESHQDYTLPGLYRVVHGIDVFDPKFNIVSPGADPRIYFPYSRKERRFSSLHPEIEELLFGREPGPEIRGVLEDRSKPIILSMARMDRIKNLSGLAEWYGRSSRLRELANLVIIGGHVDVKKSGDREEREEIRRMHEIMDEYNLDGQMRWIGAQLDKTRVGELYRVVADTRGVFVQPALFEAFGLTVIEAMASGLPVFATRHGGPLEIIEDGVSGFHIDPNDPDAAAEKLADFFERAREDPKYWEEISQAALKRVEERYTWERYAERLMTIARVYGFWRFVLSRERQVTRRYLQMFRHLQWRPLAHAVPME

SEQ ID NO: 1127 - protein, 793 aa, Artificial Sequence
  engineered sucrose synthase encoded in plasmid pA32679
MIEELRQQLLDHPNSWYAFLRHLVASQRGLWLHTDLQRECKTFREQPPEGYPETIGWLADFVAHTQEAIFRDPWMVFAWRLRPGVWEYVRIHVEQLAVEELSTDEYLQAKEQLVGGGAEGEAVLTVDFEDFRRHSQRLKDESTIGDGLTHLNRHLAGRIWTDLAAGRSQILEFLRLHRLDGQQLMLSDRITDFDSLRQTVQYLGTLPRETPWAEFREDMRRRGFEPGWGNTAGRVRETMRLLMDLLDSPSPAALESFLDRIPMISNVLIVSIHGWFAQDNVLGRPDTGGQVVYILDQARALEREMRNRLRQQGVDVEPRILIATRLIPESDGTTCDQRLEPVHGAENVHILRVPFRYEDGRIHPHWISRFKVWPYLERYAEDLEREVKAELGGRPDLIIGNYSDGNLVATLLSEKLGVTQCNIAHALEKSKYLYSDLHWKDHEQDYHFACQFTADLIAMNAADIIVTSTYQEIAGNDREVGQYESHQDYTLPGLYRVVNGIDVFDPKFNIVSPGADPRIYFPYSRTEERFSSLWPEIESLLFGREPGPDIRGVLEDRQKPIILSMARMDRIKNLSGLAEWYGRSSRLRSLANLVIIGGHVDVQNSSDAEEREEIRRMHEIMDEYQLDGQMRWVGSQLDKTRVGELYRVVADRRGVFVQPALFEAFGLTVIEAMSSGLPVFATRHGGPLEIIEDGVSGFHIDPNDPEATAEKLADFFEKARERPKYWEEISDAALARVSERYTWERYAERLMTIARVYGFWRFVTSRESQVMERYLQMFRHLQWRPLAHAVPME

SEQ ID NO: 1128 - protein, 793 aa, Artificial Sequence
  engineered sucrose synthase encoded in plasmid pA32681
MIEELRQQLLDHPNSWYAFLRWYVASQRGLWLHHDLQRECKTFREQPPPGYPETIGWLAEFVKHTQEAIFRDPWMVFALRERPGVWEYVRIHVEQLAVEELSVDEYLQAKEELVDGGAEGEAVLTVDFEDFRRNSQRLKDESTIGNGLQHLNRHLAGRIWTDLAQGLEQILDFLRLHRLDGQQLMLSDRIQDFDSLRQAVQYLGTLPRDTPWSEFEEEMRRRGFEPGWGDTAGRVRETMRLLMDLLDSPSPAALEKFLDRIPMISNVLIVSIHGWFAQDNVLGRPDTGGQVVYILDQARALEREMRERLREQGVDVEPRILIATRLIPEADGTTCDQRLEPVSGAEHVHILRVPFRYEDGRIHPHWISRFKVWPYLERFAEDLEREVLAELGGRPDLIIGNYSDGNLVATLLSEKLGVTQCNIAHALEKTKYLYSDLYWRDFEDQYHFSCQFTADLIAMNAADIIVTSTYQEIAGNDNEVGQYESHQDYTLPGLYRVVHGIDVFDPKFNIVSPGADPRIYFPYSRKERRFSSLHPEIEELLFGREPGPDIRGVLEDRSKPIILSMARMDRIKNLSGLAEWYGRSSRLRELANLVIIGGHVDVQRSSDREEREEIRRMHEIMDEYNLDGQMRWIGSQLDKTRVGELYRVVADRRGVFVQPALFEAFGLTVIEAMASGLPVFATRHGGPLEIIEDGVSGFHIDPNDPDAAAEKMADFFERAREDPKYWEEISQAALQRVYERYTWERYAERLMTIARVYGFWRFVTKRERQVTERYLQMFRHLQWRPLAHAVPME

SEQ ID NO: 1129 - protein, 793 aa, Artificial Sequence
  engineered sucrose synthase encoded in plasmid pA32683
MIEELRQQLLDHPRSWRAFLRHLVASGRDSWLHTDLQRACKTFREQPPEGYPEDIGPLADFVAHTQEAIFRDPWMYFAWRLRPGVWEYVRIHVEQLAVEELSTDEYLQFKEQLVGGGAEGEAVLTVDFEDFRPGFQRLKDESTIGDGLTHLNRHLAGRIWTDLGAGRSQILEFLGLHRLDGQQLMLSNGNTDFDSLRQTVQYLGTLPPETPWAEFREDMRRMGFEPGWGNTAERVRETMRLLMDLLDSPSPAALESFLARIPMISNVLIVSIHGWFAQDNVLGRPDTGGQVVYILDQARALEREMRNRLRQQGVDVEPRILIATRLIPESDGTTCDQRLEPVHGAENVQILRVPFRYEDGRIHPHWISRFKVWPYLERYAEDLEREVLAELGSRPDLIIGNYSDGNLVATLLSEKLGVTQCNIAHALEKSKYLYSDLHWKDHEQDYHFACQFTADLIAMNAADIIVTSTYQEIAGNDREVGQYESHQDYTLPGLYRVVNGIDVFDSKFNIVSPGADPSIYFSYSRTEERFSSLHPEIESLLFGREPGPDIRGVLEDRQKPIILSMARMDRIKNLTGLAELYGRSSRLRELANLVIIGGHVDVQNSMDAEEREEIRRMHEIMDHYQLDGQMRWVGSQLDKTVVGELYRVVADGRGVFVQPALFEAFGLTVIEAMSSGLPVFATRHGGPLEIIEDGVSGFHIDPNDPEATAEKLADFLEAARERPKYWEEISDAALARVSERYTWERYAERLMTIARVYGFWRFVLSRERQVMRRYLQMFRHLQWRPLAHAVPME

SEQ ID NO: 1130 - protein, 793 aa, Artificial Sequence
  engineered sucrose synthase encoded in plasmid pA32685
MIEELRQQLTDHPNSWRAFLRHLVASGRDSWLHHDLQDACETFREQPPEGYPEDIGPLAEFVAHTQEAIFRDPWMYFAWRLRPGVWEYVRIHVEQLAVEELSTDEYLQFKERLVNGGAEGPAVLEVDFEDFRPGFQRLKDESTIGNGLQHLNRHLAGRIWTDLGRGREKILEFLGLHRLDGQQLMLSDRNQDFDSLRQAVQYLGTLPPDTPWSEFEEDMQRMGFEPGWGDTAERVRETMRLLMDLLDSPSPSALEEFLARIPMISNVLIVSIHGWFAQDNVLGRPDTGGQVVYILDQARALEREMRRRLREQGVDVEPRILIATRLIPESDGTTCDQRLEPVSGAENVWILRVPFRYENGRIHPHWISRFKVWPYLERFAEDLEREVLAELGGRPDLIIGNYSDGNLVATLLSEKLGVTQCNIAHALEKSKYPYSDLYWKDFEQQYHFACQFTADLIAMNAADIIITSTYQEIAGNDREVGQYESHQAYTLPGLYRVVNGIDVFDSKFNIVSPGADPSIYFSYSETERRFTSLHPEIEELLFGREPGPPHRGVLSDRDKPIILSMARMDRIKNLTGLAELYGRSPRLRELANLVIIGGHVDVKKSMDREEREEIRRMHEIMDKYNLDGQMRWIGSQLDKNRVGELYRYVADRRGVFVQPALFEAFGLTVIEAMSSGLPVFATRHGGPLEIIEDGVSGFHIDPNDPDAAAEKLADFLEAARERPTYWEKISQAALQRVRERYTWERYAERLMTLARVYGFWRYVSKRERQVTRRYLQMFRHLQWRPLAHAVPME

SEQ ID NO: 1131 - protein, 793 aa, Artificial Sequence
  engineered sucrose synthase encoded in plasmid pA32689
MIEELRQQLLDSPNSWRAFLRHLVASGRDIWLHHDLQRACKDFREQPPEGYPEDISWLADFVAHTQEAIFRDPWFVFAWRLRPGVWEYVRIHVEQLVVEELSTDEYLQFKEQLVGGGAEGEAVLTVDFEDFRPGVQRLKDESTIGDGLTHLNRHLAGRMWTDLGAGRSKILEFLSLHRLDGQQLMLSNRNTDFDSLRQTLQYLGTLPRETPWAEFREDMRRRGFEPGWGRTAGRVRETMRLLMDLLDSPSPAALESFLGRIPMISNVLIVSIHGWFAQDNVLGRPDTGGQVVYILDQARALEREMRERLRQQGVDVEPRILIATRLIPESDGTTCDQRLEPVHGTENVWILRVPFRYEDGRIHPHWISRFKVWPYLERYAEDLEREVKAELGGRPDLIIGNYSDGNLVATLLSEKLGVTQCNIAHALEKSKYLYSDLHWKDHEQQYHFACQFTADLIAMNAADIIITSTYQEIAGNDREVGQYESYQDYTLPGLYRVVNGIDVFDSKFNIVSPGADPSIYFSYSRTEERFSSLHPEIEELLFGREPGPDIRGVLEDRDKPIILSMARMDRIKNLSGLAEWYGRSSRLRELANLVIIGGHVDVQNSMDAEEREEIRRMHEIMDEYQLDGQMRWVGSQLDKTRVGELYRYVADRRGVFVQPALFEAFGLTVIEAMSSGLPVFATRHGGPLEIIEHGVSGFHIDPNDPEATAEKLADFLEAARERPKYWEEISDAALARVEERYTWERYAERLMTIARCFGFWRFVSKRERQVTRRYLQMFRHLQWRPLAHAVPME

SEQ ID NO: 1132 - protein, 793 aa, Artificial Sequence
  engineered sucrose synthase encoded in plasmid pA32691
MIEELRQQLLDHPNEWRAFLRHLVASGRPMWLHHDLWRACKDFREQPPEGYPEDIGWLEQFVRHTQEAIFRDPWMVFAWRLRPGVWEYVRIHVEQLAVEELSTDEYLQFKEQLVDGGAEGEAVLTVDFEDFRPGFQRLKDESTIGNGLEHLNRHLAGRMWTDLGQGRSQLLEFLRLHRLDGQQLMLSNRNTDFDSLRQAVQYLGTLPPDTPWAEFREDMRRRGFEPGWGDTAERVRETMRLLMDLLDSPSPAALEKFLARIPMISNVLIVSIHGWFAQDNVLGRPDTGGQVVYILDQARALEREMRERLRQQGVDVEPRILIATRLIPESDGTTCDQRLEPVSGTENVQILRVPFRYEDGNIHPHWISRFKVWPYLERYAEDLEREVLAELGGRPDLIIGNYSDGNLVATLLSEKLGVTQCNIAHALEKSKYLYSDLYWKDFEQQYHFACQFTADLIAMNAADIIITSTYQEIAGNDREVGQYESHQHYTLPGLYRVVNGIDVFDPKFNIVSPGADPRIYFSYSRTEKRFSSLHPEIEELLFGREPGPPHRGVLEDRDKPIILSMARLDRIKNLTGLAEWYGRSSRLRELANLVIIGGHVDVQNSTDREEREEMRRMHEIMDEYQLDGQMRWLGSQLDKTRVGELYRYVADTRGVFVQPALFEAFGLTVIEAMASGLPVFATRHGGPLEIIEDGVSGFHIDPNDPEAVAEKLADFLEAARERPKYWEKISDAALQRVRERYTWERYAERLMTLARVYGFWRFVSSRERQVTRRYLQMFRHLQWRPLAHAVPME

SEQ ID NO: 1133 - protein, 793 aa, Artificial Sequence
  engineered sucrose synthase encoded in plasmid pA32693
MIEELRQQLHDHRNEWYAFLRHLVASGRGMWLHHDLWRACEDFREQPPEGYPEDIGWLEQFIRHTQEAIFRDPWMVFAWRLRPGVWEYVRIHVEQLVVEELSTDEYLQFKEQLVDGNAEGEAVLTVDFEDFRRGFQRLKDESTIGNGLEHLNRHLAGRMWQDLGQGRSQLLEFLRLHRLDGQQLMLSDRFQDFDSLRQALQYLGTLPPDTPWSEFREEMRRRGFEPGWGDTAERVRETMRLLMDLLDSPSPSALEKFLARIPMISNVLIVSIHGWFAQDNVLGRPDTGGQVVYILDQARALEREMRRRLREQGVDVEPRILIATRLIPEADGTTCDQRLEPVSGTENVQILRVPFRYEDGNIHPHWISRFKVWPYLERFAEDLEREVLAELGGRPDLIIGNYSDGNLVATLLSEKLGVTQCNIAHALEKSKYLYSDLYWKDFEDQYHFACQFTADLIAMNAADIIITSTYQEIAGNDREVGQYESHTHYTMPGLYRVVNGIDVFDPKFNIVSPGADPRIYFSYSRTEKRFSSLHPEIEELLFGREPGPPHRGVLEDRDKPIILSMARLDRIKNLTGLAEWYGRSSRLRELANLVIVGGHVDVANSTDREEREEIRRMHEIMDEYQLDGQMRWLGSQLDKTRVGELYRYVADKRGVFVQPALYEAFGLTVIEAMASGLPVFATRHGGPLEIIEDGVSGFHIDPNHPEQVAEKLADFLEAARERPTYWEKISQAALQRVRERYTWERYAERLMTLARVYGFWRYVSSRERQVTRRYLQMFRHLQWRPLAHAVPME

SEQ ID NO: 1134 - protein, 793 aa, Artificial Sequence
  engineered sucrose synthase encoded in plasmid pA32695
MIEELRQQLLDHPDAWRAFLRHLVASQRDIWLHHDLQDACKTFREQPPEGYPEDIGWLADFVAHTQEAIFRDPWMYFAWRLRPGVWEYVRIHVEQLAVEELSTDEYLQFKEQLVDGGAEGEAVLTVDFEDFRPGFQRLKDESTIGNGLQHLNRHLAGRMWTDLGAGRSQILEFLGLHRLDGQNLMLSDRNTDFDSLRQAVQYLGTLPDETPWAEFREDMRRRGFEPGWGNTAGRVRETMRLLMDLLDSPSPAALESFLARIPMISNVLIVSIHGWFAQDNVLGRPDTGGQVVYILDQARALEREMRNRLRQQGVDVEPRILIATRLIPESDGTTCDQRLEPVHGTENVQILRVPFRYEDGRIHPHWISRFKVWPYLERFAEDLEREVKAELGGRPDLIIGNYSDGNLVATLLSEKLGVTQCNIAHALEKSKYLYSDLHWKDHEQQYHFACQFTADLIAMNAADIIITSTYQEIAGNDREVGQYESHQDYTLPGLYRVVNGIDVFDSKFNIVSPGADPRIYFSYTRTEERFSSLHPEIERLLFGREPGPDHRGVLEDRDKPIILSMARMDRIKNLTGLAEWYGRSSRLRELANLVIIGGHVDVQNSSDAEEREEIRRMHEIMDRYQLDGQMRWVGSQLDKTVVGELYRYVADRRGVFVQPALFEAFGLTVIEAMSSGLPVFATRHGGPLEIIEDGVSGFHIDPNDPEATAEKLADFLEAARERPKYWEEISDAALARVEERYTWERYAERLMTIARVYGFWRFVSSRERQVTRRYLQMFRHLQWRPLAHAVPME

SEQ ID NO: 1135 - protein, 793 aa, Artificial Sequence
  engineered sucrose synthase encoded in plasmid pA32711
MIEELRQQLLDHPNTWRAFLRHLLASGRTMWLHHDLQRACKDFREQPPEGYPEDISALAEFVKHTQEAIVRDPWVYFAWRERPGVWEYVRIHIEQLVVEELSVSEYLQFKEQLVGGGAEGNAVLEVDFEDFRPGFQRLKDESTIGNGVEHLNRHLAGRMWQDLGKGDDKILDFLSLHRHRGQQLMLSDRISDFDSLRQALQYLGTLPEDTPWAEFEEDMRRMGFEPGWGRTAARVRETMRLLMDLLDSPSPSALEKFLGRIPMISNVLIVSIHGYFAQDNVLGRPDTGGQVVYILDQARALEREMRERLRQQGVDVEPRILIATRLIPEADGTTCDQRLEPVSGTENVHILRVPFRYEDGRIHPHWISRFRVWPYLERFAEDLEREVLAELGGRPDLIIGNYSDGNLVATLLSEKLGVTQCNIAHALEKSKYLYSDLHWKDFEQQYHFACQFTADLIAMNAADIIITSTYQEIAGNDHEVGQYESHQSYTMPGLYRVVNGIDVFDPKFNIVSPGADPRIYFSYSRTEERLTSLHPEIEELLFGREPGPDHRGVLSDRDKPIILSMARMDRIKNLTGLAEWYGRSSRLRELANLVIIGGHVDVQKSSDSEEREEIRRMHEIMDEYNLDGQMRWVGSQLDKVRVGELYRYVADTRGVFVQPALYEAFGLTVIEAMASGLPVFATRHGGPLEIIEDGVSGFHIDPNDPDAVAEKLADFLEAARERPKYWEKISQAALQRVRERYTWERYAERLMTIARVYGFWKYVSSRERQVMRRYLQMFRHLQWRPLAHAVPME

SEQ ID NO: 1136 - protein, 793 aa, Artificial Sequence
  engineered sucrose synthase encoded in plasmid pA32725
MIEVLRQQLLDSPRSWRAFLRHLVASQRDSWLHTDLQHACKTFREQPPEGYPEDIGWLADFIAHCQEAIFRDPWVVFAWRLRPGVWEYVRIHVEQLAVEELSTDEYLQAKEQLVGLGAEGEAVLTVDFEDFRPVSQRLKDESTIGDGLTHLNRHLAGRIWTDLAAGRSAILEFLGLHRLDNQNLMLSNGNTDFDSLRQTVQYLGTLPRETPWAEFREDMRRRGFEPGWGNTAGRVRETMRLLMDLLDSPSPAALESFLDRIPMISNVLIVSPHGWFAQDKVLGRPDTGGQVVYILDQVRALEREMRNRLRQQGVDVEPRILIVTRLIPESDGTTCDQRLEPVHGAENVQILRVPFRYEDGRIHPHWISRFKVWPYLERFARDAEREVKAELGSRPDLIIGNYSDGGLVATILSEKLGVTQCNIAHALEKSKYPGSDLHWPLYEQDHHFACQFTADLIAMNAADFIVTSTYQEIAGNDREVGQYESHQDYTLPGLYRVENGIDVFDSKFNIVSPGADPSTYFSYARHEERFSSLWPEIESLLFGREPGPDIRGVLEDPQKPIILSVARMDRIKNLSGLAELYGRSARLRSLANLVIIGGHVDVQASMDAEEREEIRRMHEIMDRYQLDGQMRWLGSHLDKRVVGELYRVVADGRGVFVQPALFEAFGLTVIEAMSSGLPVFATRHGGPLEIIEDGVSGFHIDPNDPEAVAEKLADFLEAARERPKYWEEISQAALARVSERYTWERYAERLMTLARIFGFWRFVLSRESQVMERYLQMFRHLQWRPLAHAVPME

SEQ ID NO: 1137 - protein, 793 aa, Artificial Sequence
  engineered sucrose synthase encoded in plasmid pA32740
MRERVEDTLSAHRNELVSLLSRYVAQGKGILQPHQLLDELEAVIGESDERQKLKDGPFGEVLKSTQEAIVLPPWVALAVRPRPGVWEYVRVNVSELTVEQLTVSEYLRFKEELVDGSSEGNAVLEVDFEDFNASFQRPKDESTIGNGVQHLNRHLSGRMWRDLESGLEPLLDFLRAHKYKGHTMMLNDRIQSFDSLRKAEQYLGKLPPDTPYSEFEYKLQELGLERGWGDTAERVLEMIRLLMDILDSPSPSTLETFLGRIPMVFNVVILSPHGYFGQANVLGLPDTGGQVVYILDQVRALENEMLLRIKQQGLDITPRILIVTRLIPDAKGTTCGQRLEKVSGTEHSHILRVPFRTEKGIVRPKWISRFDVWPYLERFAEDAANEIAAELQGKPDLIIGNYSDGNLVASLLAHKLGVTQCNIAHALEKTKYPDSDIYWKKFEEKYHFSCQFTADLIAMNHADFIITSTYQEIAGSDDTVGQYESHTAFTLPGLYRVVHGIDVFDPKFNIVSPGADMSIYFPYTEKEKRLTSLHPSIEELLYSPEQNDEHIGVLKDRSKPIIFSVARLDRVKNITGLVEWYGKNKRLRELVNLVVVAGDIDVKKSKDREEIAEIEKMHELIKKYKLNGQFRWISAHTNKVRVGELYRYIADTKGAFVQPAFYEAFGLTVVEAMTCGLPTFATCHGGPAEIIEHGVSGFHIDPYHGDQAAELLVDFFEKCKTDPSHWEKISEGGLQRIYERYTWKIYSERLMTLAGVYGFWKYVSKRERQVTRRYLQMFRHLQFRPLVHSVPLE

SEQ ID NO: 1138 - protein, 793 aa, Artificial Sequence
  engineered sucrose synthase encoded in plasmid pA32744
MRERLEDTLSAHRNELVSLLSRYVAQGKGILQPHQLLDELEAVIEEDREREKLRDGPFGEVLRSAQEAIVLPPWVALAVRPRPGVWEYVRVNVEELSVEELTVSEYLKFKEELVDGSSEGNAVLEVDFEDFNASFQRPKDESTIGNGVQHLNRHLSGRLWRDLESGMEPLLDFLRAHKYKGKTMMLNDRIQSFDSLRKAEQYLGKLPPDTPYSEFEHKLQELGLERGWGDTAERVLEMIRLLMDLLDSPSPSTLEKFLGRIPMVFNVVILSPHGYFGQANVLGMPDTGGQVVYILDQVRALENEMLLRIKQQGLDITPRILIVTRLIPDAVGTTCNQRLEKVSGTEHSHILRVPFRTEKGILRPKWISRFDVWPYLERFAEDVASEIAAELQGKPDLIIGNYSDGNLVASLLAHKLGVTQCTIAHALEKTKYPDSDIYWKKFEEKYHFSCQFTADLIAMNHADFIITSTYQEIAGSDDTVGQYESHTAFTLPGLYRVVHGIDVFDPKFNIVSPGADMSIYFPYTEKKKRLTSLHPEIEELLYSPEQNEEHIGVLKDRSKPIIFSVARLDRVKNITGLVEWYGKNAKLRELVNLVVVAGDHDVKKSKDREEIAEIEKMHELIEKYKLNGQFRWISAHMNKVRVGELYRYIADTKGAFVQPAFYEAFGLTVVEAMTCGLPTFATCHGGPAEIIVHGKSGFHIDPYHGDQAAELLVDFFEKCKTDPSHWDKISEGGLQRIYERYTWKIYSERLMTLAGVYGFWKYVSKRERQVTRRYLQMFRHLQFRPLAHSVPLE

SEQ ID NO: 1139 - protein, 793 aa, Artificial Sequence
  engineered sucrose synthase encoded in plasmid pA32764
MIESLEEFLAEHRDAVYLLLRHYLALGRPFLLRSDLWDEFQAFCEEQGEEEALRDSPLARLIRAAQEAVIDAPWIYLAVRPRVARWEYLRIHVETLDVEEISVSEFLAFKERLVNGDAEGEAVLEVDLGDFNREFQKLKDESTIGRGVEHLNRHLSGRLWQDLGKGDQRLLDFLRVHQCRGQQLMLNDRIRDFDALRRAEQYLGGQPPEAPWDDVGHELQELGFEPGWGRTVARMRETLRLLMDILDSPSPGTLERFLGRIPMIFSIAILSPHGYFGQSNVLGLPDTGGQVVYILDQVRALEREMRRRLAEQGLDIEPQILVVTRLIPEAGGTTCDQRLEPIVGTENARILRVPFRNEDGEVVPQWISRFEVWPYLERFALDVERELLAELGGRPDLIIGNYSDGNLVATLLSQKLGVTQCNIAHALEKTKYLYSDLYWRDNEPQYHFSCQFTADLIAMNAADFIITSTYQEIAGTDDSVGQYESYSAFTMPGLYRVVNGIDVFDPKFNIVSPGADADVYFPYTDTERRLTGLHPEIEELVFGGPERPDARGVLADRDKPLLFTVARLDRIKNITGLVEWYGRSERLRELANLLVIAGHVDPSRSSDREEREQIARMHELMDEHGLDGQVRWLGTHLDKNLVGELYRYVADRRGAFVQPALFEAFGLTVIEAMSSGLPTFATCYGGPLEIIEHGVSGFHIDPNHGEEAAELMADFFERCAADPGYWERISQGALERVESRYTWELYAERMMTLSRIYGFWKYVTNRERQVTRRYLQMFRHLQFRPLAHAVPLE

SEQ ID NO: 1140 - protein, 793 aa, Artificial Sequence
  engineered sucrose synthase encoded in plasmid pA32768
MIDELREFLAEHRDAAYLLLRRYLGLGRPFLLRSDLWDEFLAFCEEQGEEEELKDSPLARAIRHTQEAALDAPWIYLAVRPRVARWRYLRFHLETMEVEEISVSEFLAFKERLVNGDPEGEAVLEVDLGDFNREFQKLKDESTIGRGVEHLNRHLSGRLWQDLGKGDQRLLDFLRVHQYRGQQLMLNDRIRDFDELRRALQYLGRQPDDAPWEEVAHRLRRLGFEPGWGRTVARIRDTMRLLMDILDSPSPETLERFLGRIPMIFSLAILSPHGYFGQSNVLGRPDTGGQVVYILDQVRALEREMRRRLAEQGLDIEPQILVVTRLIPEAEGTTCDQRLEPIVGTRNARILRVPFRNEDGEVVPHWISRFEVWPYLERFALDVERELLAELGGRPDLIIGNYSDGNLVATLLSQKLGVTQCNIAHALEKTKYLYSDLYWRDNEEQYHFSCQFTADLIAMNAADFIITSTYQEIAGTDDSVGQYESYSAFTMPGLYRVVNGIDVFDPKFNIVSPGADAEVYFPYTETERRLTGLHPEIEELIFGGETRPDARGVLEERDKPLLFTVARLDRIKNITGLVEWYGRSPRLRELANLLVIAGHVDPEQSGDREEREQIQRMHELMDRHGLDGQVRWLGLHLDKNLVGELYRFVADRRGAFVQPALFEAFGLTVIEAMASGLPTFATRYGGPLEIIEHGVSGFHIDPNHGEEAAELIADFFERCAEEPGYWERISRGALERVRARYTWELYAERMMTLSRIYGFWKYVTNRERQVTRRYLQMFRHLQFRPLAHAVPLE

SEQ ID NO: 1141 - protein, 793 aa, Artificial Sequence
  engineered sucrose synthase encoded in plasmid pA32772
MIESLEEFLAEHRDQVYLLLRRYLGLGRPFLLRSDLWDEFERFCAEQGEEEELLDSPLARLIAAAQEAALDAPWLYLAVRPRVARWRYLRIHLETLEVEEIDVSEFLAFKERLVNGDPEGEAVLEVDFGDFNREFQKLKDESTIGRGVEHLNRHLSGRLWQDLGKGDQRLLEFLRVHQYRGQQLMLNDRIRDFDGLRRALQYLGKQPDDAPWEEVGHELQELGFEPGWGRTVARMRDTLRLLMDILDSPSPETLERFLGRIPMIFNIAILSPHGYFGQANVLGRPDTGGQVVYILDQVRALEREMRRRLAEQGLDIEPQILVVTRLIPEAGGTTCDQRLEPIVGTENARILRVPFRNEDGEVVPQWISRFEVWPYLERFALDVEKELLAELGGRPDLIIGNYSDGNLVATLLAQKLGVTQCNIAHALEKTKYLYSDLYWRDNEPQYHFSCQFTADLIAMNAADFIITSTYQEIAGTDDSVGQYESYGAFTMPGLYRVVNGIDVFDPKFNIVSPGADAEVYFPYTETERRLTGLHPEIEELLFGGPPRPDARGVLEDRDKPLLFTVARLDRIKNITGLVEWYGRSERLRELANLLVIAGHVDPEQSGDEEEREQIGRMHELMDRYGLDGQVRWLGVHLDKNLVGELYRYIADRRGAFVQPALFEAFGLTVIEAMSSGLPTFATCYGGPLEIIEDGVSGFHIDPNHGEEAAELIADFFERCAEDPGYWERISQGALERVRSRYTWELYAERMMTLSRIYGFWKYVTNRERQVTRRYLQMFRHLQYRPLAHAVPLE

SEQ ID NO: 1142 - protein, 793 aa, Artificial Sequence
  engineered sucrose synthase encoded in plasmid pA32773
MIESLREFLAEHREQVYLLLRHYLALGRPFLLRSDLWDEFERFCEEDGEGEGLLDSPLARLIARTQEAALDAPWIYLAVRPRVARWEYLRFHVETLEVEEISVSEFLAFKERLVNGDGEGEAVLEVDLGDFNREFQKLKDESTIGRGVEHLNRHLSGRLWQDLGKGDQRLLDFLRVHQHRGQQLMLNDRIKDFDGLRRAEQYLGRQPDEAPWSEVGHELQELGFEPGWGRTVARMRETLRLLMDILDSPSPRTLERFLGRIPMIFSIAILSPHGYFGQANVLGLPDTGGQVVYILDQVRALEREMRRRLAEQGLDIEPQILVITRLIPEAGGTTCDQRLEPIVGTENARILRVPFRNEDGEVIPHWISRFEVWPYLERFALDVERELLAELGGRPDLIIGNYSDGNLVATLLAQKLGVTQCNIAHALEKTKYLYSDLYWRDNEEQYHFSCQFTADLIAMNAADFIITSTYQEIAGTDDSVGQYESYSAFTMPGLYRVVNGIDVFDPKFNIVSPGADADVYFPYTETERRLTGLHPEIEELVFGGETRPDARGVLEDPDKPLLFTVARLDRIKNITGLVEWYGASPRLRELANLLVVAGHVDPARSSDREEREQIQRMHQLMDEYGLDGQVRWLGVHLDKNLVGELYRYVADRRGAFVQPALFEAFGLTVIEAMSSGLPTFATCYGGPLEIIEDGVSGFHIDPNHGEEAAELMADFFERCAADPGYWERISQGALERVRSRYTWELYAERMMTLSRVYGFWKYVTNRERQVTRRYLQMFRHLQFRPLAHAVPLE

SEQ ID NO: 1143 - protein, 793 aa, Artificial Sequence
  engineered sucrose synthase encoded in plasmid pA32774
MIEALREFLAEHRDAVYRLLRRYLGLGRPFLLRSDLWDEFEAFCEEDGEESELLDSPLARLIRRTQEAALDAPWIYLAVRPRVARWRYLRIHLETLDVEEISVSEFLAFKERLVTGDAEGDAVLEVDLGDFNREFQKLKDESTIGRGVEHLNRHLSGRLWQDLGKGDQRLLDFLRVHQYRGQQLMLNDRIRDFDELRRALQYLGRQPPEAPWADVAHELQRLGFEPGWGRTAARIRDTMRLLMDILDSPSPRNLERFLGRIPMIFSLAILSPHGYFGQSNVLGLPDTGGQVVYILDQVRALEREMRQRLAEQGLDIEPQILVVTRLIPEAGGTTCDQRLEPIVGTENARILRVPFRNEDGEVVPHWISRFEVWPYLERFALDVERELLAELGGRPDLIIGNYSDGNLVATLLSQKLGVTQCNIAHALEKTKYLYSDLYWRDNEPQYHFSCQFTADLIAMNAADFIITSTYQEIAGTDDSVGQYESYSAFTMPGLYRVVNGIDVFDPKFNIVSPGADAEVYFPYTEKERRLTGLHPEIEELIFGGEERADARGVLADRDKPLLFTVARLDRIKNITGLVEWYGASPRLRELANLLVIGGHVDPERSGDREEREQIARMHELMDRHGLDGQVRWLGLHLDKNLVGELYRYVADRRGAFVQPALFEAFGLTVIEAMSSGLPTFATRYGGPLEIIEHGVSGFHIDPNHGDEAAELLADFFERCAADPGYWERISQGALERVRSRYTWELYAERMMTLSRIYGFWKYVTNRERQVTRRYLQMFRHLQYRPLAHAVPLE

SEQ ID NO: 1144 - protein, 793 aa, Artificial Sequence
  engineered sucrose synthase encoded in plasmid pA32776
MIETLEQFLSEHREVVYLLLRRYLGLGRPFLLRSDLWDEFARFCEEQGEAEALLDSPLARIIARAQEAALDAPWIYLAVRPRVARWEYLRIHLETMEVEEISVSEFLAFKERLVTGDPEGEAVLEVDLGDFNREFQKLKDESTIGRGVEHLNRHLSGRLWQDLGKGDQRLLDFLRVHQYRGQQLMLNGRIRDFDELRRALQYLGGQPPEAPWEEVAHELQELGFEPGWGRTVARMRDTLRLLMDILDSPSPETLERFLGRIPMIFSIAILSPHGYFGQANVLGLPDTGGQVVYILDQVRALEREMRQRLHEQGLDIEPQILVVTRLIPEAGGTTCDQRLEPIVGTENARILRVPFRNEDGEVLPHWISRFEVWPYLERFALDVERELLAELGGRPDLIIGNYSDGNLVATLLAQKLGVTQCNIAHALEKTKYLYSDLYWRDNEAQYHFSCQFTADLIAMNAADFIITSTYQEIAGTDDSVGQYESYGAFTMPGLYRVVNGIDVFDPKFNIVSPGADADVYFPYTETERRLTGLHPEIEALIFGGEPRPDARGVLEDPDKPLLFTVARLDRIKNITGLVEWYGRSERLRELANLLVVAGHVDPARSGDREEREQIERMHQLMDEHGLDGQVRWLGTHLDKNLVGELYRYVADRRGAFVQPALFEAFGLTVIEAMSSGLPTFATRYGGPLEIIEHGVSGFHIDPNHGEEAAELIADFFERCAADPGYWERLSQGALERVRSRYTWKLYAERMMTLSRIYGFWKYVTNRERQVTRRYLQMFRHLQFRPLAHAVPLE

SEQ ID NO: 1145 - protein, 793 aa, Artificial Sequence
  engineered sucrose synthase encoded in plasmid pA32777
MIEELRQFLAEHRDAVYLLLRRYLALGRPFLLRSDLWDEFAAFCEEDGEEEELRDSPLARAIARAQEAVLDAPWIYFAVRPRVARWRYLRIHLETLEVEEISVSEFLAFKERLVNPDPEGDAVLEVDLGDFNREFQKLKDESTIGRGVEHLNRHLSGRLWQDLGKGDQRLLDFLRVHQYRGQQLMLNDRIRDFDELRRAEQYLGGQPPEAPWEEVAHDLQRLGFEPGWGRTAARMRDTLRLLMDILDSPSPATLERFLGRIPMIFSLAILSPHGYFGQSNVLGRPDTGGQVVYILDQVRALEKEMRRRLAEQGLDIEPQILVVTRLIPEAGGTTCDQRLEPIVGTENARILRVPFRNEDGEVVPHWISRFEVWPYLERFALDVEKELLAELGGRPDLIIGNYSDGNLVATLLSQKLGVTQCNIAHALEKTKYLYSDLYWRDNEEQYHFSCQFTADLIAMNAADFIITSTYQEIAGTDDSVGQYESYSAFTMPGLYRVVNGIDVFDPKFNIVSPGADAEVYFPYTETERRLTGLHPEIESLIYGGPPRPDARGVLADRDKPLLFTVARLDRIKNITGLVEWYGASPRLRELANLLVIAGHVDPEHSDDEEEREQIARMHELMDRHGLDGQVRWLGLHLDKNLVGELYRYVADRRGAFVQPALFEAFGLTVIEAMSSGLPTFATCYGGPLEIIEHGVSGFHIDPNHGEAAAELMADFFERCAAEPGYWERISRGALERVAARYTWKLYAERMMTLSRIYGFWKYVTNRERQVTRRYLQMFRHLQFRPLAHAVPLE

SEQ ID NO: 1146 - protein, 793 aa, Artificial Sequence
  engineered sucrose synthase encoded in plasmid pA32778
MIESLREFLSEHRDAVYLLLRHYLGLGRPFLLRSDLWDEFERFCEEDGEEEALLDSPLARAIAATQEAAVDAPWIYLAVRPRVARWEYLRFHLETLEVEEISVSEFLAFKERLVNGDAEGDAVLEVDLGDFNREFQKLKDESTIGRGVEHLNRHLSGRLWQDLGKGDQRLLDFLRVHQYRGQQLMLNDRIKDFDELRRALQYLGGQPPDAPWEEVGHALQELGFEPGWGRTAARMRDTLRLLMDILDSPSPATLERFLGRIPMIFSIAILSPHGYFGQANVLGRPDTGGQVVYILDQVRALEREMRQRLHEQGLDIEPQILVVTRLIPEAGGTTCDQRLEPIVGTENARILRVPFRNEDGEVIPQWISRFEVWPYLERFALDVERELLAELGGRPDLIIGNYSDGNLVATLLAQKLGVTQCNIAHALEKTKYLYSDLYWRDNEEQYHFSCQFTADLIAMNAADFIITSTYQEIAGTDDSVGQYESYGAFTMPGLYRVVNGIDVFDPKFNIVSPGADAEIYFPYTETERRLTSLHPEIEELIYGGEDRPDARGVLEDPDKPLLFTVARLDRIKNITGLVEWYGRSERLRELANLLVIAGHVDASQSSDREEREQIGRMHELMDEYGLDGQVRWLGAHLDKNLVGELYRYIADRRGAFVQPALFEAFGLTVIEAMTSGLPTFATCYGGPLEIIEDGVSGFHIDPNHGEEAAERIADFFERCAAEPGYWERISQGALERVRSRYTWELYAERMMTLSRIYGFWKYVTNRERQVTRRYLQMFRHLQYRPLAHAVPLE

SEQ ID NO: 1147 - protein, 793 aa, Artificial Sequence
  engineered sucrose synthase encoded in plasmid pA32795
MIEELREFLRDHRESVYLLLRRYLALGRPFLLRSDLWDEFLAFCEEDGGEEALADSPLARAIRRAQEAALDAPWIYLALRPRVARWEYLRIHLETLDVEEISVSEFLAFKERLVGGDAEGEAVLEVDLGDFNREFQKLKDESTIGRGVEHLNRHLSGRLWQDLGKGDQRLLDFLRVHQYRGQQLMLNDRIRDFDALRRALQYLGRQPPEAPWEEVAHELQRLGFEPGWGRTAARIRDTMRLLMDILDSPSPATLERFLGRIPMIFSIAILSPHGYFGQANVLGLPDTGGQVVYILDQVRALEREMRRRLAEQGLDIEPQILVVTRLIPEAGGTTCDQRLEPIVGTENARILRVPFRNEDGEVVPHWISRFEVWPYLERYALDVERELLAELGGRPDLIIGNYSDGNLVATLLSQKLGVTQCNIAHALEKTKYLYSDLYWRDNEEQYHFSCQFTADLIAMNAADFIITSTYQEIAGTDDSVGQYESYSAFTMPGLYRVVNGIDVFDPKFNIVSPGADAEIYFPYTDTERRLTGLHPEIEELVFGGEPRPDARGVLAEPDKPLLFTVARLDRIKNITGLVEWYGASERLRELANLLVIAGHVDPARSSDREEREQIQRMHELMDEHGLDGQVRWLGVHLDKNLVGELYRYVADRRGAFVQPALFEAFGLTVIEAMSSGLPTFATRYGGPLEIIEHGVSGFHIDPNHGEAAAELIADFFERCAADPGYWERISQGALARVEARYTWKLYAERMMTLSRIYGFWKYVTNRERQVTRRYLQMFRHLQFRPLAHAVPLE

SEQ ID NO: 1148 - protein, 793 aa, Artificial Sequence
  engineered sucrose synthase encoded in plasmid pA32803
MIEVLRQQLLDSPRSWRAFLRHLVASQRDSWLHTDLQHACKTFREQPPEGYPEDIGWLADFIAHCQEAIFRDPWMVFAWRLRPGVWEYVRIHVEQLAVEELSTDEYLQAKEQLVGLGAEGEAVLTVDFEDFRPVSQRLKDESTIGDGLTHLNRHLAGRIWTDLAAGRSAILEFLGLHRLDNQNLMLSNGNTDFDSLRQTVQYLGTLPRETPWAEFREDMRRRGFEPGWGNTAGRVRETMRLLMDLLDSPSPAALESFLDRIPMISNVLIVSIHGWFAQDKVLGRPDTGGQVVYILDQARALEREMRNRLRQQGVDVEPRILIATRLIPESDGTTCDQRLEPVHGAENVQILRVPFRYEDGRIHPHWISRFKVWPYLERYARDLEREVKAELGSRPDLIIGNYSDGGLVATILSEKLGVTQCNIAHALEKSKYPGSDLHWPLYEQDHHFACQFTADLIAMNAADIIVTSTYQEIAGNDREVGQYESHQDYTLPGLYRVENGIDVFDSKFNIVSPGADPSTYFSYARHEERFSSLWPEIESIVFGREPGPDIRGVLEDPQKPIILSIARMDRIKNLSGLAELYGRSARLRSLANLIIIGGHVDVQASMDAEEREEIRRMHEIMDRYQLDGQMRWLGSHLDKRWVGEWYRWIADGRGVWVQPALFEAFGLTVIEVMSSGLPVFATRHGGPLEIIEDGVSGFHIDPNDPEAVAEKLADFLEAARERPKYWEEISQAALARVSERYTWERYAERLMTIARCFGFWRFVLSRESQVMERYLQMFRHLQWRPLAHAVPME

SEQ ID NO: 1149 - protein, 793 aa, Artificial Sequence
  engineered sucrose synthase encoded in plasmid pA32805
MIEVLRQQLLDSPRSWRAFLRHLVASQRDSWLHTDLQHACKTFREQPPEGYPEDIGWLADFIAHCQEAIFRDPWMVFAWRLRPGVWEYVRIHVEQLAVEELSTDEYLQAKEQLVGLGAEGEAVLTVDFEDFRPVSQRLKDESTIGDGLTHLNRHLAGRWWTDLAAGRSAIVEWIGLHRIDNQNLLWSNGNTDWDSIRQILQYLGTLPRETPWAEFREDWRRRGWEPGWGNTAGRVRETLRILWDLIDSPSPAALESWLDRLPLISNVLIVSIHGWFAQDKVLGRPDTGGQVVYILDQARALEREMRNRLRQQGIDIEPRILIATRLIPESDGTTCDQRLEPVHGAENVQILRVPFRYEDGRIHPHWISRFKVWPYLERYARDLEREVKAELGSRPDLIIGNYSDGGLVATILSEKLGVTQCNIAHALEKSKYPGSDLHWPLYEQDHHFACQFTADLIAMNAADIIVTSTYQEIAGNDREVGQYESHQDYTLPGLYRVENGIDVFDSKFNIVSPGADPSTYFSYARHEERFSSLWPEIESLLFGREPGPDIRGVLEDPQKPIILSVARMDRIKNLSGLAELYGRSARLRSLANLVIIGGHVDVQASMDAEEREEIRRMHEIMDRYQLDGQMRWVGSHLDKRVVGELYRVVADGRGVFVQPALFEAFGLTVIEAMSSGLPVFATRHGGPLEIIEDGVSGFHIDPNDPEAVAEKLADFLEAARERPKYWEEISQAALARVSERYTWERYAERLMTIARVFGLWRFLLSRESQVMERYLQMFRHLQWRPLAHAVPME

SEQ ID NO: 1150 - protein, 793 aa, Artificial Sequence
  engineered sucrose synthase encoded in plasmid pA32807
MIEVLRQQLLDSPRSWRAFLRHLVASQRDSWLHTDLQHACKTFREQPPEGYPEDIGWLADFIAHCQEAIFRDPWMVFAWRLRPGVWEYVRIHVEQLAVEELSTDEYLQAKEQLVGLGAEGEAVLTVDFEDFRPVSQRLKDESTIGDGLTHLNRHIAGRLWTDLAAGRSAWIEWLGLHRIDNQNLWLSNGNTDLDSLRQILQYLGTLPRETPWAEFREDWRRRGWEPGWGNTAGRVRETLRIWMDLLDSPSPAAIESFLDRLPLISNVLIVSIHGWFAQDKVLGRPDTGGQVVYILDQARALEREMRNRLRQQGIDIEPRILIATRLIPESDGTTCDQRLEPVHGAENVQILRVPFRYEDGRIHPHWISRFKVWPYLERYARDLEREVKAELGSRPDLIIGNYSDGGLVATILSEKLGVTQCNIAHALEKSKYPGSDLHWPLYEQDHHFACQFTADLIAMNAADIIVTSTYQEIAGNDREVGQYESHQDYTLPGLYRVENGIDVFDSKFNIVSPGADPSTYFSYARHEERFSSLWPEIESLLFGREPGPDIRGVLEDPQKPIILSVARMDRIKNLSGLAELYGRSARLRSLANLVIIGGHVDVQASMDAEEREEIRRMHEIMDRYQLDGQMRWVGSHLDKRVVGELYRVVADGRGVFVQPALFEAFGLTVIEAMSSGLPVFATRHGGPLEIIEDGVSGFHIDPNDPEAVAEKLADFLEAARERPKYWEEISQAALARVSERYTWERYAERLMTIARVFGWWRFLLSRESQVMERYLQMFRHLQWRPLAHAVPME

SEQ ID NO: 1151 - protein, 793 aa, Artificial Sequence
  engineered sucrose synthase encoded in plasmid pA32809
MIEVLRQQLLDSPRSWRAFLRHLVASQRDSWLHTDLQHACKTFREQPPEGYPEDIGWLADFIAHCQEAIFRDPWMVFAWRLRPGVWEYVRIHVEQLAVEELSTDEYLQAKEQLVGLGAEGEAVLTVDFEDFRPVSQRLKDESTIGDGLTHLNRHIAGRIWTDWAAGRSAILEWLGLHRIDNQNLWLSNGNTDMDSLRQILQYLGTLPRETPWAEFREDLRRRGIEPGWGNTAGRVRETWRILMDLIDSPSPAAIESWLDRLPLISNVLIVSIHGWFAQDKVLGRPDTGGQVVYILDQARALEREMRNRLRQQGIDIEPRILIATRLIPESDGTTCDQRLEPVHGAENVQILRVPFRYEDGRIHPHWISRFKVWPYLERYARDLEREVKAELGSRPDLIIGNYSDGGLVATILSEKLGVTQCNIAHALEKSKYPGSDLHWPLYEQDHHFACQFTADLIAMNAADIIVTSTYQEIAGNDREVGQYESHQDYTLPGLYRVENGIDVFDSKFNIVSPGADPSTYFSYARHEERFSSLWPEIESLLFGREPGPDIRGVLEDPQKPIILSVARMDRIKNLSGLAELYGRSARLRSLANLVIIGGHVDVQASMDAEEREEIRRMHEIMDRYQLDGQMRWVGSHLDKRVVGELYRVVADGRGVFVQPALFEAFGLTVIEAMSSGLPVFATRHGGPLEIIEDGVSGFHIDPNDPEAVAEKLADFLEAARERPKYWEEISQAALARVSERYTWERYAERLMTIARVFGWWRFILSRESQVMERYLQMFRHLQWRPLAHAVPME

SEQ ID NO: 1152 - protein, 793 aa, Artificial Sequence
  engineered sucrose synthase encoded in plasmid pA32813
MIEVLRQQLLDSPRSWRAFLRHLVASQRDSWLHTDLQHACKTFREQPPEGYPEDIGWLADFIAHCQEAIFRDPWMVFAWRLRPGVWEYVRIHVEQLAVEELSTDEYLQAKEQLVGLGAEGEAVLTVDFEDFRPVSQRLKDESTIGDGLTHLNRHLAGRLWTDLAAGRSAILEFLGLHRIDNQNLWLSNGNTDWDSLRQILQYLGTLPRETPWAEFREDWRRRGWEPGWGNTAGRVRETLRIWWDLMDSPSPAAWESWLDRLPLISNVLIVSIHGWFAQDKVLGRPDTGGQVVYILDQARALEREMRNRLRQQGIDIEPRILIATRLIPESDGTTCDQRLEPVHGAENVQILRVPFRYEDGRIHPHWISRFKVWPYLERYARDLEREVKAELGSRPDLIIGNYSDGGLVATILSEKLGVTQCNIAHALEKSKYPGSDLHWPLYEQDHHFACQFTADLIAMNAADIIVTSTYQEIAGNDREVGQYESHQDYTLPGLYRVENGIDVFDSKFNIVSPGADPSTYFSYARHEERFSSLWPEIESLLFGREPGPDIRGVLEDPQKPIILSVARMDRIKNLSGLAELYGRSARLRSLANLVIIGGHVDVQASMDAEEREEIRRMHEIMDRYQLDGQMRWVGSHLDKRVVGELYRVVADGRGVFVQPALFEAFGLTVIEAMSSGLPVFATRHGGPLEIIEDGVSGFHIDPNDPEAVAEKLADFLEAARERPKYWEEISQAALARVSERYTWERYAERLMTIARVFGFWRFLLSRESQVMERYLQMFRHLQWRPLAHAVPME

SEQ ID NO: 1153 - protein, 793 aa, Artificial Sequence
  engineered sucrose synthase encoded in plasmid pA32815
MIEVLRQQLLDSPRSWRAFLRHLVASQRDSWLHTDLQHACKTFREQPPEGYPEDIGWLADFIAHCQEAIFRDPWMVFAWRLRPGVWEYVRIHVEQLAVEELSTDEYLQAKEQLVGLGAEGEAVLTVDFEDFRPVSQRLKDESTIGDGLTHLNRHLAGRIWTDLAAGRSAILEFLGLHRLDNQNLMLSNGNTDFDSLRQTVQYLGTLPRETPWAEFREDMRRRGFEPGWGNTAGRVRETMRLLMDLLDSPSPAALESFLDRIPMISNILIVSIHGWFAQDKVLGRPDTGGQVVWILDQARALEREIRNRLRQQGVDVEPRILIATRLIPESDGTTCDQRLEPVHGAENVQILRVPFRYEDGRIHPHWISRFKVWPYLERYARDLEREVKAELGSRPDLIIGNYSDGGLVATILSEKLGVTQINVAHALEKSKYPGSDLHWPLYEQDHHFACQFTADLIAMNAADMIITSTYQEIAGNDREVGQYESHQDYTLPGLYRVENGIDVFDSKFNILSPGADPSTYFSYARHEERFSSLWPEIESLLFGREPGPDIRGVLEDPQKPIILSVARMDRIKNLSGLAELYGRSARLRSLANLVIIGGHVDVQASMDAEEREEIRRMHEIMDRYQLDGQMRWVGSHLDKRVVGELYRVVADGRGVFVQPALFEAFGLTVIEAMSSGLPVFATRHGGPLEIIEDGVSGFHIDPNDPEAVAEKLADFLEAARERPKYWEEISQAALARVSERYTWERWAERWLTWVRCWGFWRFVLSRESQVMERYLQMFRHLQWRPLAHAVPME

SEQ ID NO: 1154 - protein, 793 aa, Artificial Sequence
  engineered sucrose synthase encoded in plasmid pA32817
MIEVLRQQLLDSPRSWRAFLRHLVASQRDSWLHTDLQHACKTFREQPPEGYPEDIGWLADFIAHCQEAIFRDPWMVFAWRLRPGVWEYVRIHVEQLAVEELSTDEYLQAKEQLVGLGAEGEAVLTVDFEDFRPVSQRLKDESTIGDGLTHLNRHLAGRIWTDLAAGRSAILEFLGLHRLDNQNLMLSNGNTDFDSLRQTVQYLGTLPRETPWAEFREDMRRRGFEPGWGNTAGRVRETMRLLMDLLDSPSPAALESFLDRIPMISNILIVSIHGWFAQDKVLGRPDTGGQVVFILDQARALEREIRNRLRQQGVDVEPRILIATRLIPESDGTTCDQRLEPVHGAENVQILRVPFRYEDGRIHPHWISRFKVWPYLERYARDLEREVKAELGSRPDVIIGNYSDGGLVATILSEKLGVTQVNIAHALEKSKYPGSDLHWPLYEQDHHFACQFTADLIAMNAADMIITSTYQEIAGNDREVGQYESHQDYTLPGLYRVENGIDVFDSKFNIISPGADPSTYFSYARHEERFSSLWPEIESLLFGREPGPDIRGVLEDPQKPIILSVARMDRIKNLSGLAELYGRSARLRSLANLVIIGGHVDVQASMDAEEREEIRRMHEIMDRYQLDGQMRWVGSHLDKRVVGELYRVVADGRGVFVQPALFEAFGLTVIEAMSSGLPVFATRHGGPLEIIEDGVSGFHIDPNDPEAVAEKLADFLEAARERPKYWEEISQAALARVSERYTWERWAERWLTILRCWGFWRFVLSRESQVMERYLQMFRHLQWRPLAHAVPME

SEQ ID NO: 1155 - protein, 793 aa, Artificial Sequence
  engineered sucrose synthase encoded in plasmid pA32827
MIEVLRQQLLDSPRSWRAFLRHLVASQRDSWLHTDLQHACKTFREQPPEGYPEDIGWLADFIAHCQEAIFRDPWMVFAWRLRPGVWEYVRIHVEQLAVEELSTDEYLQAKEQLVGLGAEGEAVLTVDFEDFRPVSQRLKDESTIGDGLTHLNRHLAGRIWTDLAAGRSAILEFLGLHRLDNQNLMLSNGNTDFDSLRQTVQYLGTLPRETPWAEFREDMRRRGFEPGWGNTAGRVRETMRLLMDLLDSPSPAALESFLDRIPMISNVLIVSIHGWFAQDKVLGRPDTGGQVVYILDQARALEREMRNRLRQQGVDVEPRILIATRLIPESDGTTCDQRLEPVHGAENVQILRVPFRYEDGRIHPHWISRFKVWPYLERYARDLEREVKAELGSRPDLIIGNYSDGGLVATILSEKLGVTQCNIAHALEKSKYPGSDLHWPLYEQDHHFACQFTADLIAMNAADIIVTSTYQEIAGNDREVGQYESHQDYTLPGLYRVENGIDVFDSKFNIVSPGADPSTYFSYARHEERFSSLWPEIESLLFGREPGPDIRGVLEDPQKPILLSVARLDRIKNLSGLLEMWGRSARLRSLANLVIIGGHVDVQASMDAEEREEVRRLHEIMDRYQLDGQVRWVGSHLDKRVVGELYRVVADGRGIFIQPALFEAFGLTVIEAMSSGLPVWATRHGGPLEIIEDGVSGFHIDPNDPEAVIEKIADLWEAARERPKYWEEISQAALARVSERYTWERYAERLMTIARCFGFWRFVLSRESQVMERYLQMFRHLQWRPLAHAVPME

SEQ ID NO: 1156 - protein, 793 aa, Artificial Sequence
  engineered sucrose synthase encoded in plasmid pA32832
MIEVLRQQLLDSPRSWRAFLRHLVASQRDSWLHTDLQHACKTFREQPPEGYPEDIGWLADFIAHCQEAIFRDPWMVFAWRLRPGVWEYVRIHVEQLAVEELSTDEYLQAKEQLVGLGAEGEAVLTVDFEDFRPVSQRLKDESTIGDGLTHLNRHLAGRIWTDLAAGRSAILEFLGLHRLDNQNLMLSNGNTDFDSLRQTVQYLGTLPRETPWAEFREDMRRRGFEPGWGNTAGRVRETMRLLMDLLDSPSPAALESFLDRIPMISNVLIVSIHGWFAQDKVLGRPDTGGQVVYILDQARALEREMRNRLRQQGVDVEPRILIATRLIPESDGTTCDQRLEPVHGAENVQILRVPFRYEDGRIHPHWISRFKVWPYLERYARDLEREVKAELGSRPDLIIGNYSDGGLVATILSEKLGVTQCNIAHALEKSKYPGSDLHWPLYEQDHHFACQFTADLIAMNAADIIVTSTYQEIAGNDREVGQYESHQDYTLPGLYRVENGIDVFDSKFNIVSPGADPSTYFSYARHEERFSSLWPEIESIVFGREPGPDIRGVLEDPQKPIIVSIARMDRIKNLSGLAELYGRSARLRSLANLIIIGGHVDVQASMDAEEREEIRRMHEIMDRYQLDGQMRWIGSHLDKRWVGEWYRWIADGRGVWVQPALFEAFGLTVIEVMSSGLPVFATRHGGPLEIIEDGVSGFHIDPNDPEAVAEKLADFLEAARERPKYWEEISQAALARVSERYTWERYAERLMTIARCFGFWRFVLSRESQVMERYLQMFRHLQWRPLAHAVPME

SEQ ID NO: 1157 - protein, 793 aa, Artificial Sequence
  engineered sucrose synthase encoded in plasmid pA32833
MIEVLRQQLLDSPRSWRAFLRHLVASQRDSWLHTDLQHACKTFREQPPEGYPEDIGWLADFIAHCQEAIFRDPWMVFAWRLRPGVWEYVRIHVEQLAVEELSTDEYLQAKEQLVGLGAEGEAVLTVDFEDFRPVSQRLKDESTIGDGLTHLNRHLAGRIWTDLAAGRSAILEFLGLHRLDNQNLMLSNGNTDFDSLRQTVQYLGTLPRETPWAEFREDMRRRGFEPGWGNTAGRVRETMRLLMDLLDSPSPAALESFLDRIPMISNVLIVSIHGWFAQDKVLGRPDTGGQVVYILDQARALEREMRNRLRQQGVDVEPRILIATRLIPESDGTTCDQRLEPVHGAENVQILRVPFRYEDGRIHPHWISRFKVWPYLERYARDLEREVKAELGSRPDLIIGNYSDGGLVATILSEKLGVTQCNIAHALEKSKYPGSDLHWPLYEQDHHFACQFTADLIAMNAADIIVTSTYQEIAGNDREVGQYESHQDYTLPGLYRVENGIDVFDSKFNIVSPGADPSTYFSYARHEERFSSLWPEIESIWFGREPGPDIRGVLEDPQKPLIISWARMDRIKNLSGLAELYGRSARLRSLANLIIWGGHVDVQASMDAEEREEIRRMHEIMDRYQLDGQMRWVGSHLDKRLVGEIYRIVADGRGVIVQPALFEAFGLTVIEVMSSGLPVFATRHGGPLEIIEDGVSGFHIDPNDPEAVAEKLADFLEAARERPKYWEEISQAALARVSERYTWERYAERLMTIARCFGFWRFVLSRESQVMERYLQMFRHLQWRPLAHAVPME

SEQ ID NO: 1158 - protein, 793 aa, Artificial Sequence
  engineered sucrose synthase encoded in plasmid pA32839
MIEVLRQQLLDSPRSWRAFLRHLVASQRDSWLHTDLQHACKTFREQPPEGYPEDIGWLADFIAHCQEAIFRDPWMVFAWRLRPGVWEYVRIHVEQLAVEELSTDEYLQAKEQLVGLGAEGEAVLTVDFEDFRPVSQRLKDESTIGDGLTHLNRHIAGRWWTDNAAGRSAWIEWLGLHRIDNQNLLWSNGNTDLDSVRQLLQYLGTIPRETPWAELREDIRRRGWEPGLGNTAGRVRETLRLWVDWWDSPSPAALESILDRIPIISNVLIVSIHGWFAQDKVLGRPDTGGQVVYILDQARALEREMRNRLRQQGIDVEPRILIATRLIPESDGTTCDQRLEPVHGAENVQILRVPFRYEDGRIHPHWISRFKVWPYLERYARDLEREVKAELGSRPDLIIGNYSDGGLVATILSEKLGVTQCNIAHALEKSKYPGSDLHWPLYEQDHHFACQFTADLIAMNAADIIVTSTYQEIAGNDREVGQYESHQDYTLPGLYRVENGIDVFDSKFNIVSPGADPSTYFSYARHEERFSSLWPEIESLLFGREPGPDIRGVLEDPQKPIILSVARMDRIKNLSGLAELYGRSARLRSLANLVIIGGHVDVQASMDAEEREEIRRMHEIMDRYQLDGQMRWVGSHLDKRVVGELYRVVADGRGVFVQPALFEAFGLTVIEAMSSGLPVFATRHGGPLEIIEDGVSGFHIDPNDPEAVAEKLADFLEAARERPKYWEEISQAALARVSERYTWERYAERLMTIARVFGLWRFLLSRESQVMERYLQMFRHLQWRPLAHAVPME

SEQ ID NO: 1159 - protein, 793 aa, Artificial Sequence
  engineered sucrose synthase encoded in plasmid pA32841
MIEVLRQQLLDSPRSWRAFLRHLVASQRDSWLHTDLQHACKTFREQPPEGYPEDIGWLADFIAHCQEAIFRDPWMVFAWRLRPGVWEYVRIHVEQLAVEELSTDEYLQAKEQLVGLGAEGEAVLTVDFEDFRPVSQRLKDESTIGDGLTHLNRHIAGRIWTDVAAGRSAILEWLGLHRIDNQNLWWSNGNTDWDSIRQILQYLGTLPRETPLAELREDWRRRGWEPGWGNTAGRIRETLRILWDLIDSPSPAAWESWLDRVPIISNVLIVSIHGWFAQDKVLGRPDTGGQVVYILDQARALEREMRNRLRQQGIDVEPRILIATRLIPESDGTTCDQRLEPVHGAENVQILRVPFRYEDGRIHPHWISRFKVWPYLERYARDLEREVKAELGSRPDLIIGNYSDGGLVATILSEKLGVTQCNIAHALEKSKYPGSDLHWPLYEQDHHFACQFTADLIAMNAADIIVTSTYQEIAGNDREVGQYESHQDYTLPGLYRVENGIDVFDSKFNIVSPGADPSTYFSYARHEERFSSLWPEIESLLFGREPGPDIRGVLEDPQKPIILSVARMDRIKNLSGLAELYGRSARLRSLANLVIIGGHVDVQASMDAEEREEIRRMHEIMDRYQLDGQMRWVGSHLDKRVVGELYRVVADGRGVFVQPALFEAFGLTVIEAMSSGLPVFATRHGGPLEIIEDGVSGFHIDPNDPEAVAEKLADFLEAARERPKYWEEISQAALARVSERYTWERYAERLMTIARIFGLWRFWLSRESQVMERYLQMFRHLQWRPLAHAVPME

SEQ ID NO: 1160 - protein, 793 aa, Artificial Sequence
  engineered sucrose synthase encoded in plasmid pA32843
MIEVLRQQLLDSPRSWRAFLRHLVASQRDSWLHTDLQHACKTFREQPPEGYPEDIGWLADFIAHCQEAIFRDPWMVFAWRLRPGVWEYVRIHVEQLAVEELSTDEYLQAKEQLVGLGAEGEAVLTVDFEDFRPVSQRLKDESTIGDGLTHLNRHLAGRWWTDLAAGRSALLEWLGLHRLDNQNLWWSNGNTDWDSVRQWLQYLGTLPRETPLAELREDLRRRGWEPGMGNTAGRIRETLRLLLDLLDSPSPAALESWLDRVPVISNVLIVSIHGWFAQDKVLGRPDTGGQVVYILDQARALEREMRNRLRQQGIDIEPRILIATRLIPESDGTTCDQRLEPVHGAENVQILRVPFRYEDGRIHPHWISRFKVWPYLERYARDLEREVKAELGSRPDLIIGNYSDGGLVATILSEKLGVTQCNIAHALEKSKYPGSDLHWPLYEQDHHFACQFTADLIAMNAADIIVTSTYQEIAGNDREVGQYESHQDYTLPGLYRVENGIDVFDSKFNIVSPGADPSTYFSYARHEERFSSLWPEIESLLFGREPGPDIRGVLEDPQKPIILSVARMDRIKNLSGLAELYGRSARLRSLANLVIIGGHVDVQASMDAEEREEIRRMHEIMDRYQLDGQMRWVGSHLDKRVVGELYRVVADGRGVFVQPALFEAFGLTVIEAMSSGLPVFATRHGGPLEIIEDGVSGFHIDPNDPEAVAEKLADFLEAARERPKYWEEISQAALARVSERYTWERYAERLMTIARVFGLWRFILSRESQVMERYLQMFRHLQWRPLAHAVPME

SEQ ID NO: 1161 - protein, 793 aa, Artificial Sequence
  engineered sucrose synthase encoded in plasmid pA32849
MIEVLRQQLLDSPRSWRAFLRHLVASQRDSWLHTDLQHACKTFREQPPEGYPEDIGWLADFIAHCQEAIFRDPWMVFAWRLRPGVWEYVRIHVEQLAVEELSTDEYLQAKEQLVGLGAEGEAVLTVDFEDFRPVSQRLKDESTIGDGLTHLNRHLAGRIWTDLAAGRSAILEFLGLHRLDNQNLMLSNGNTDFDSLRQTVQYLGTLPRETPWAEFREDMRRRGFEPGWGNTAGRVRETMRLLMDLLDSPSPAALESFLDRIPMISNILIVSIHGWFAQDKVLGRPDTGGQVVVILDQARALERELRNRLRQQGVDVEPRILIATRLIPESDGTTCDQRLEPVHGAENVQILRVPFRYEDGRIHPHWISRFKVWPYLERYARDLEREVKAELGSRPDVIIGNYSDGGLVATILSEKLGVTQVNMAHALEKSKYPGSDLHWPLYEQDHHFACQFTADLIAMNAADVIITSTYQEIAGNDREVGQYESHQDYTLPGLYRVENGIDVFDSKFNIISPGADPSTYFSYARHEERFSSLWPEIESLLFGREPGPDIRGVLEDPQKPIILSVARMDRIKNLSGLAELYGRSARLRSLANLVIIGGHVDVQASMDAEEREEIRRMHEIMDRYQLDGQMRWVGSHLDKRVVGELYRVVADGRGVFVQPALFEAFGLTVIEAMSSGLPVFATRHGGPLEIIEDGVSGFHIDPNDPEAVAEKLADFLEAARERPKYWEEISQAALARVSERYTWERWAERILTLWRCLGFWRFVLSRESQVMERYLQMFRHLQWRPLAHAVPME

SEQ ID NO: 1162 - protein, 793 aa, Artificial Sequence
  engineered sucrose synthase encoded in plasmid pA32851
MIEVLRQQLLDSPRSWRAFLRHLVASQRDSWLHTDLQHACKTFREQPPEGYPEDIGWLADFIAHCQEAIFRDPWMVFAWRLRPGVWEYVRIHVEQLAVEELSTDEYLQAKEQLVGLGAEGEAVLTVDFEDFRPVSQRLKDESTIGDGLTHLNRHLAGRIWTDLAAGRSAILEFLGLHRLDNQNLMLSNGNTDFDSLRQTVQYLGTLPRETPWAEFREDMRRRGFEPGWGNTAGRVRETMRLLMDLLDSPSPAALESFLDRIPMISNILWVSIHGWFAQDKVLGRPDTGGQVVILLDQARALEREIRNRLRQQGVDVEPRILWATRLIPESDGTTCDQRLEPVHGAENVQILRVPFRYEDGRIHPHWISRFKVWPYLERYARDLEREVKAELGSRPDVIIGNYSDGGLVATILSEKLGVTQLNMAHALEKSKYPGSDLHWPLYEQDHHFACQFTADLIAMNAADIIVTSTYQEIAGNDREVGQYESHQDYTLPGLYRVENGIDVFDSKFNIISPGADPSTYFSYARHEERFSSLWPEIESLLFGREPGPDIRGVLEDPQKPIILSVARMDRIKNLSGLAELYGRSARLRSLANLVIIGGHVDVQASMDAEEREEIRRMHEIMDRYQLDGQMRWVGSHLDKRVVGELYRVVADGRGVFVQPALFEAFGLTVIEAMSSGLPVFATRHGGPLEIIEDGVSGFHIDPNDPEAVAEKLADFLEAARERPKYWEEISQAALARVSERYTWERWAERIMTIWRCLGFWRFVLSRESQVMERYLQMFRHLQWRPLAHAVPME

SEQ ID NO: 1163 - protein, 793 aa, Artificial Sequence
  engineered sucrose synthase encoded in plasmid pA32853
MIEVLRQQLLDSPRSWRAFLRHLVASQRDSWLHTDLQHACKTFREQPPEGYPEDIGWLADFIAHCQEAIFRDPWMVFAWRLRPGVWEYVRIHVEQLAVEELSTDEYLQAKEQLVGLGAEGEAVLTVDFEDFRPVSQRLKDESTIGDGLTHLNRHLAGRIWTDLAAGRSAILEFLGLHRLDNQNLMLSNGNTDFDSLRQTVQYLGTLPRETPWAEFREDMRRRGFEPGWGNTAGRVRETMRLLMDLLDSPSPAALESFLDRIPMISNVLIVSIHGWFAQDKVLGRPDTGGQVVYILDQARALEREMRNRLRQQGVDVEPRILIATRLIPESDGTTCDQRLEPVHGAENVQILRVPFRYEDGRIHPHWISRFKVWPYLERYARDLEREVKAELGSRPDVIIGNYSDGGLVATILSEKLGVTQINIAHALEKSKYPGSDLHWPLYEQDHHFACQFTADLIAMNAADAIVTSTYQEIAGNDREVGQYESHQDYTLPGLYRVENGIDVFDSKFNIISPGADPSTYFSYARHEERFSSLWPEIESLLFGREPGPDIRGVLEDPQKPIILSVARMDRIKNLSGLAELYGRSARLRSLANLVIIGGHVDVQASMDAEEREEIRRMHEIMDRYQLDGQMRWVGSHLDKRVVGELYRVVADGRGVFVQPALFEAFGLTVIEAMSSGLPVFATRHGGPLEIIEDGVSGFHIDPNDPEAVAEKLADFLEAARERPKYWEEISQAALARVSERYTWERYAERMMTLARCMGFWRFVLSRESQVMERYLQMFRHLQWRPLAHAVPME

SEQ ID NO: 1164 - protein, 793 aa, Artificial Sequence
  engineered sucrose synthase encoded in plasmid pA32857
MIEVLRQQLLDSPRSWRAFLRHLVASQRDSWLHTDLQHACKTFREQPPEGYPEDIGWLADFIAHCQEAIFRDPWMVFAWRLRPGVWEYVRIHVEQLAVEELSTDEYLQAKEQLVGLGAEGEAVLTVDFEDFRPVSQRLKDESTIGDGLTHLNRHLAGRIWTDLAAGRSAILEFLGLHRLDNQNLMLSNGNTDFDSLRQTVQYLGTLPRETPWAEFREDMRRRGFEPGWGNTAGRVRETMRLLMDLLDSPSPAALESFLDRIPMISNVLILSWHGWFAQDKVLGRPDTGGQVVYILDQARALEREMRNRLRQQGVDVEPRIIILTRLIPESDGTTCDQRLEPVHGAENVQILRIPFRYEDGRIHPHWISRFKVWPYLERLVRDIEREVKAELGSRPDLIIGNYSDGGLIATILSEKWGVTQCNIAHALEKSKYPGSDLHWPLYEQDHHFACQFTADLIAMNAADIIVTSTYQEIAGNDREVGQYESHQDYTLPGLYRVENGIDVFDSKFNIVSPGADPSTYFSYARHEERFSSLWPEIESLLFGREPGPDIRGVLEDPQKPIILSVARMDRIKNLSGLAELYGRSARLRSLANLVIIGGHVDVQASMDAEEREEIRRMHEIMDRYQLDGQMRWVGSHLDKRVVGELYRVVADGRGVFVQPALFEAFGLTVIEAMSSGLPVFATRHGGPLEIIEDGVSGFHIDPNDPEAVAEKLADFLEAARERPKYWEEISQAALARVSERYTWERYAERLMTIARCFGFWRFVLSRESQVMERYLQMFRHLQWRPLAHAVPME

SEQ ID NO: 1165 - protein, 793 aa, Artificial Sequence
  engineered sucrose synthase encoded in plasmid pA32859
MIEVLRQQLLDSPRSWRAFLRHLVASQRDSWLHTDLQHACKTFREQPPEGYPEDIGWLADFIAHCQEAIFRDPWMVFAWRLRPGVWEYVRIHVEQLAVEELSTDEYLQAKEQLVGLGAEGEAVTTWDLEDLRPVSQRLKDESTIGDGLTHLNRHLAGRIWTDLAAGRSAILEFLGLHRLDNQNLMLSNGNTDFDSLRQTVQYLGTLPRETPWAEFREDMRRRGFEPGWGNTAGRVRETMRLLMDLLDSPSPAALESFLDRIPMISNVLIVSIHGWFAQDKVLGRPDTGGQVVYILDQARALEREMRNRLRQQGVDVEPRILIATRLIPESDGTTCDQRLEPVHGAENVQILRVPFRYEDGRIHPHWISRFKVWPYLERYARDLEREVKAELGSRPDLIIGNYSDGGLVATILSEKLGVTQCNIAHALEKSKYPGSDLHWPLYEQDHHFACQFTADWIAMNAADIIVTSTYQEIAGNDREVGQYESHQDYTLPGLYRVENGIDVFDSKFNIVSPGADPSTYFSYARHEERFSSLWPEIESLLFGREPGPDIRGVLEDPQKPIILSVARMDRIKNLSGLAELYGRSARLRSLANLVIIGGHVDVQASMDAEEREEIRRMHEIMDRYQLDGQMRWVGSHLDKRVVGELYRVVADGRGVFVQPALFEAFGLTVIEAMSSGLPVFATRHGGPLEIIEDGVSGFHIDPNDPEAVAEKLADFLEAARERPKYWEEISQAALARVSERYTWERYAERLMTIARCFGFWRFVLSRESQVMERYLQMIRHLQWRPLAHAVPME

SEQ ID NO: 1166 - protein, 793 aa, Artificial Sequence
  engineered sucrose synthase encoded in plasmid pA32867
MIEELRQQLLDSPRSWRAFLRHLVASQRDSWLHTDLQRACKTFREQPPEGYPEDIGWLADFVAHTQEAIFRDPWMVFAWRLRPGVWEYVRIHVEQLAVEELSTDEYLQAKEQLVGLGAEGEAVLTVDFEDFRPVSQRLKDESTIGDGLTHLNRHLAGRIWTDLAAGRSQILEFLGLHRLDNQNLMLSNGNTDFDSLRQTVQYLGTLPRETPWAEFREDMRRRGFEPGWGNTAGRVRETMRLLMDLLDSPSPAALESFLDRIPMISNVLIVSIHGWFAQDKVLGRPDTGGQVVYILDQARALEREMRNRLRQQGVDVEPRILIATRLIPESDGTTCDQRLEPVHGAENVQILRVPFRYEDGRIHPHWISRFKVWPYLERYASDLEREVKAELGSRPDLIIGNYSDGNLVATLLSEKLGVTQCNIAHALEKSKYLYSDLHWPDHEQDHHFACQFTADLIAMNAADIIVTSTYQEIAGNDREVGQYESHQDYTLPGLYRVENGIDVFDSKFNIVSPGADPRTYFSYARTEERFSSLWPEIESLLFGREPGPDIRGVLEDRQKPIILSMGRLDRIKNLSGLLELWGRSSRLRSLANLVIIGGHLDVQNSMDAEEREEIRRLHEIMDHYQLDGQVRLVGSQLDKTVVGELYRVVADGRGIFIQPALFEAFGLTVIEAMSSGLPVWATRHGGPLEIIEDGVSGFHIDPNDPEATVEKWADWWEAARERPKYWEEISDAALARVSERYTWERYAERLMTIARCFGFWRFVLSRESQVMERYLQMFRHLQWRPLAHAVPME

SEQ ID NO: 1167 - protein, 793 aa, Artificial Sequence
  engineered sucrose synthase encoded in plasmid pA32872
MIEELRQQLLDSPRSWRAFLRHLVASQRDSWLHTDLQRACKTFREQPPEGYPEDIGWLADFVAHTQEAIFRDPWMVFAWRLRPGVWEYVRIHVEQLAVEELSTDEYLQAKEQLVGLGAEGEAVLTVDFEDFRPVSQRLKDESTIGDGLTHLNRHLAGRIWTDLAAGRSQILEFLGLHRLDNQNLMLSNGNTDFDSLRQTVQYLGTLPRETPWAEFREDMRRRGFEPGWGNTAGRVRETMRLLMDLLDSPSPAALESFLDRIPMISNVLIVSIHGWFAQDKVLGRPDTGGQVVYILDQARALEREMRNRLRQQGVDVEPRILIATRLIPESDGTTCDQRLEPVHGAENVQILRVPFRYEDGRIHPHWISRFKVWPYLERYASDLEREVKAELGSRPDLIIGNYSDGNLVATLLSEKLGVTQCNIAHALEKSKYLYSDLHWPDHEQDHHFACQFTADLIAMNAADIIVTSTYQEIAGNDREVGQYESHQDYTLPGLYRVENGIDVFDSKFNIVSPGADPRTYFSYARTEERFSSLWPEIESLWFGREPGPDIRGVLEDRQKPIILSMARMDRIKNLSGLAELYGRSSRLRSLANLIIIGGHVDVQNSMDAEEREEIRRMHEIMDHYQLDGQMRWIGSQLDKTLVGELYRLIADGRGVWVQPALFEAFGLTVIEVMSSGLPVFATRHGGPLEIIEDGVSGFHIDPNDPEATAEKLADFLEAARERPKYWEEISDAALARVSERYTWERYAERLMTIARCFGFWRFVLSRESQVMERYLQMFRHLQWRPLAHAVPME

SEQ ID NO: 1168 - protein, 793 aa, Artificial Sequence
  engineered sucrose synthase encoded in plasmid pA32873
MIEELRQQLLDSPRSWRAFLRHLVASQRDSWLHTDLQRACKTFREQPPEGYPEDIGWLADFVAHTQEAIFRDPWMVFAWRLRPGVWEYVRIHVEQLAVEELSTDEYLQAKEQLVGLGAEGEAVLTVDFEDFRPVSQRLKDESTIGDGLTHLNRHLAGRIWTDLAAGRSQILEFLGLHRLDNQNLMLSNGNTDFDSLRQTVQYLGTLPRETPWAEFREDMRRRGFEPGWGNTAGRVRETMRLLMDLLDSPSPAALESFLDRIPMISNVLIVSIHGWFAQDKVLGRPDTGGQVVYILDQARALEREMRNRLRQQGVDVEPRILIATRLIPESDGTTCDQRLEPVHGAENVQILRVPFRYEDGRIHPHWISRFKVWPYLERYASDLEREVKAELGSRPDLIIGNYSDGNLVATLLSEKLGVTQCNIAHALEKSKYLYSDLHWPDHEQDHHFACQFTADLIAMNAADIIVTSTYQEIAGNDREVGQYESHQDYTLPGLYRVENGIDVFDSKFNIVSPGADPRTYFSYARTEERFSSLWPEIESMLFGREPGPDIRGVLEDRQKPIILSMARMDRIKNLSGLAELYGRSSRLRSLANLIIIGGHVDVQNSMDAEEREEIRRMHEIMDHYQLDGQMRWIGSQLDKTLVGEIYRVVADGRGVWVQPALFEAFGLTVIEVMSSGLPVFATRHGGPLEIIEDGVSGFHIDPNDPEATAEKLADFLEAARERPKYWEEISDAALARVSERYTWERYAERLMTIARCFGFWRFVLSRESQVMERYLQMFRHLQWRPLAHAVPME

SEQ ID NO: 1169 - protein, 793 aa, Artificial Sequence
  engineered sucrose synthase encoded in plasmid pA32887
MIEELRQQLLDSPRSWRAFLRHLVASQRDSWLHTDLQRACKTFREQPPEGYPEDIGWLADFVAHTQEAIFRDPWMVFAWRLRPGVWEYVRIHVEQLAVEELSTDEYLQAKEQLVGLGAEGEAVLTVDFEDFRPVSQRLKDESTIGDGLTHLNRHLAGRIWTDLAAGRSQILEFLGLHRLDNQNLMLSNGNTDFDSLRQTVQYLGTLPRETPWAEFREDMRRRGFEPGWGNTAGRVRETMRLLMDLLDSPSPAALESFLDRIPMISNILIVSIHGWFAQDKVLGRPDTGGQVVYILDQARALEREMRNRLRQQGVDVEPRILIATRLIPESDGTTCDQRLEPVHGAENVQILRVPFRYEDGRIHPHWISRFKVWPYLERYASDLEREVKAELGSRPDAIIGNYSDGNLVATLLSEKLGVTQTNIAHALEKSKYLYSDLHWPDHEQDHHFACQFTADLIAMNAADVIVTSTYQEIAGNDREVGQYESHQDYTLPGLYRVENGIDVFDSKFNIVSPGADPRTYFSYARTEERFSSLWPEIESLLFGREPGPDIRGVLEDRQKPIILSMARMDRIKNLSGLAELYGRSSRLRSLANLVIIGGHVDVQNSMDAEEREEIRRMHEIMDHYQLDGQMRWVGSQLDKTVVGELYRVVADGRGVFVQPALFEAFGLTVIEAMSSGLPVFATRHGGPLEIIEDGVSGFHIDPNDPEATAEKLADFLEAARERPKYWEEISDAALARVSERYTWERYAERMLTILRCFGFWRFVLSRESQVMERYLQMFRHLQWRPLAHAVPME

SEQ ID NO: 1170 - protein, 793 aa, Artificial Sequence
  engineered sucrose synthase encoded in plasmid pA32889
MIEELRQQLLDSPRSWRAFLRHLVASQRDSWLHTDLQRACKTFREQPPEGYPEDIGWLADFVAHTQEAIFRDPWMVFAWRLRPGVWEYVRIHVEQLAVEELSTDEYLQAKEQLVGLGAEGEAVLTVDFEDFRPVSQRLKDESTIGDGLTHLNRHLAGRIWTDLAAGRSQILEFLGLHRLDNQNLMLSNGNTDFDSLRQTVQYLGTLPRETPWAEFREDMRRRGFEPGWGNTAGRVRETMRLLMDLLDSPSPAALESFLDRIPMISNVIIISIHGWFAQDKVLGRPDTGGQVVYILDQARALEREMRNRLRQQGVDVEPRIIILTRLIPESDGTTCDQRLEPVHGAENVQILRIPFRYEDGRIHPHWISRFKVWPYLERWVSDVEREIKAELGSRPDLIIGNYSDGNLIATLMSEKWGVTQCNIAHALEKSKYLYSDLHWPDHEQDHHFACQFTADLIAMNAADIIVTSTYQEIAGNDREVGQYESHQDYTLPGLYRVENGIDVFDSKFNIVSPGADPRTYFSYARTEERFSSLWPEIESLLFGREPGPDIRGVLEDRQKPIILSMARMDRIKNLSGLAELYGRSSRLRSLANLVIIGGHVDVQNSMDAEEREEIRRMHEIMDHYQLDGQMRWVGSQLDKTVVGELYRVVADGRGVFVQPALFEAFGLTVIEAMSSGLPVFATRHGGPLEIIEDGVSGFHIDPNDPEATAEKLADFLEAARERPKYWEEISDAALARVSERYTWERYAERLMTIARCFGFWRFVLSRESQVMERYLQMFRHLQWRPLAHAVPME

SEQ ID NO: 1171 - protein, 793 aa, Artificial Sequence
  engineered sucrose synthase encoded in plasmid pA32891
MIEELRQQLLDSPRSWRAFLRHLVASQRDSWLHTDLQRACKTFREQPPEGYPEDIGWLADFVAHTQEAIFRDPWMVFAWRLRPGVWEYVRIHVEQLAVEELSTDEYLQAKEQLVGLGAEGEAVLTVDFEDFRPVSQRLKDESTIGDGLTHLNRHLAGRIWTDLAAGRSQILEFLGLHRLDNQNLMLSNGNTDFDSLRQTVQYLGTLPRETPWAEFREDMRRRGFEPGWGNTAGRVRETMRLLMDLLDSPSPAALESFLDRIPMISNVIIISIHGWFAQDKVLGRPDTGGQVVYILDQARALEREMRNRLRQQGVDVEPRILIITRLIPESDGTTCDQRLEPVHGAENVQILRIPFRYEDGRIHPHWISRFKVWPYLERWVSDVEREIKAELGSRPDLIIGNYSDGNLVATLMSEKWGVTQCNIAHALEKSKYLYSDLHWPDHEQDHHFACQFTADLIAMNAADIIVTSTYQEIAGNDREVGQYESHQDYTLPGLYRVENGIDVFDSKFNIVSPGADPRTYFSYARTEERFSSLWPEIESLLFGREPGPDIRGVLEDRQKPIILSMARMDRIKNLSGLAELYGRSSRLRSLANLVIIGGHVDVQNSMDAEEREEIRRMHEIMDHYQLDGQMRWVGSQLDKTVVGELYRVVADGRGVFVQPALFEAFGLTVIEAMSSGLPVFATRHGGPLEIIEDGVSGFHIDPNDPEATAEKLADFLEAARERPKYWEEISDAALARVSERYTWERYAERLMTIARCFGFWRFVLSRESQVMERYLQMFRHLQWRPLAHAVPME

SEQ ID NO: 1172 - protein, 793 aa, Artificial Sequence
  engineered sucrose synthase encoded in plasmid pA32897
MIEELRQQLLDSPRSWRAFLRHLVASQRDSWLHTDLQRACKTFREQPPEGYPEDIGWLADFVAHTQEAIFRDPWMVFAWRLRPGVWEYVRIHVEQLAVEELSTDEYLQAKEQLVGLGAEGEAVLTVDFEDFRPVSQRLKDESTIGDGLTHLNRHLAGRIWTDLAAGRSQILEFLGLHRLDNQNLMLSNGNTDFDSLRQTVQYLGTLPRETPWAEFREDMRRRGFEPGWGNTAGRVRETMRLLMDLLDSPSPAALESFLDRIPMISNVLIVSIHGWFAQDKVLGRPDTGGQVVYILDQARALEREMRNRLRQQGVDVEPRILIATRLIPESDGTTCDQRLEPVHGAENVQILRVPFRYEDGRIHPHWISRFKVWPYLERYASDLEREVKAELGSRPDLIIGNYSDGNLVATLLSEKLGVTQCNIAHALEKSKYLYSDLHWPDHEQDHHFACQFTADLIAMNAADIIVTSTYQEIAGNDREVGQYESHQDYTLPGLYRVENGIDVFDSKFNIVSPGADPRTYFSYARTEERFSSLWPEIESLLFGREPGPDIRGVLEDRQKPIILSMMRLDRIKNLSGWWEIWGRSSRLRSLANLVVIGGHVDVQNSMDAEEREEVRRLHEILDHYQLDGQVRWVGSQLDKTVVGELYRVVADGRGIFIQPALFEAFGLTVIEAMSSGLPVWATRHGGPLEIIEDGVSGFHIDPNDPEATLEKIADWLEAARERPKYWEEISDAALARVSERYTWERYAERLMTIARCFGFWRFVLSRESQVMERYLQMFRHLQWRPLAHAVPME

SEQ ID NO: 1173 - protein, 793 aa, Artificial Sequence
  engineered sucrose synthase encoded in plasmid pA32901
MIEELRQQLLDSPRSWRAFLRHLVASQRDSWLHTDLQRACKTFREQPPEGYPEDIGWLADFVAHTQEAIFRDPWMVFAWRLRPGVWEYVRIHVEQLAVEELSTDEYLQAKEQLVGLGAEGEAVLTVDFEDFRPVSQRLKDESTIGDGLTHLNRHLAGRIWTDLAAGRSQILEFLGLHRLDNQNLMLSNGNTDFDSLRQTVQYLGTLPRETPWAEFREDMRRRGFEPGWGNTAGRVRETMRLLMDLLDSPSPAALESFLDRIPMISNVLIVSIHGWFAQDKVLGRPDTGGQVVYILDQARALEREMRNRLRQQGVDVEPRILIATRLIPESDGTTCDQRLEPVHGAENVQILRVPFRYEDGRIHPHWISRFKVWPYLERYASDLEREVKAELGSRPDLIIGNYSDGNLVATLLSEKLGVTQCNIAHALEKSKYLYSDLHWPDHEQDHHFACQFTADLIAMNAADIIVTSTYQEIAGNDREVGQYESHQDYTLPGLYRVENGIDVFDSKFNIVSPGADPRTYFSYARTEERFSSLWPEIESIIFGREPGPDIRGVLEDRQKPIIVSIARMDRIKNLSGLAELYGRSSRLRSLANLIIIGGHVDVQNSMDAEEREEIRRMHEIMDHYQLDGQMRWIGSQLDKTWVGEWYRWVADGRGVIVQPALFEAFGLTVIEVMSSGLPVFATRHGGPLEIIEDGVSGFHIDPNDPEATAEKLADFLEAARERPKYWEEISDAALARVSERYTWERYAERLMTIARCFGFWRFVLSRESQVMERYLQMFRHLQWRPLAHAVPME

SEQ ID NO: 1174 - protein, 793 aa, Artificial Sequence
  engineered sucrose synthase encoded in plasmid pA32907
MIEELRQQLLDSPRSWRAFLRHLVASQRDSWLHTDLQRACKTFREQPPEGYPEDIGWLADFVAHTQEAIFRDPWMVFAWRLRPGVWEYVRIHVEQLAVEELSTDEYLQAKEQLVGLGAEGEAVLTVDFEDFRPVSQRLKDESTIGDGLTHLNRHLAGRIWTDLAAGRSQILEFLGLHRLDNQNLMLSNGNTDFDSLRQTVQYLGTLPRETPWAEFREDMRRRGFEPGWGNTAGRVRETMRLLMDLLDSPSPAALESFLDRIPMISNVLIVSIHGWFAQDKVLGRPDTGGQVVYILDQARALEREMRNRLRQQGVDVEPRILIATRLIPESDGTTCDQRLEPVHGAENVQILRVPFRYEDGRIHPHWISRFKVWPYLERYASDLEREVKAELGSRPDLIIGNYSDGNLVATLLSEKLGVTQCNIAHALEKSKYLYSDLHWPDHEQDHHFACQFTADLIAMNAADIIVTSTYQEIAGNDREVGQYESHQDYTLPGLYRVENGIDVFDSKFNIVSPGADPRTYFSYARTEERFSSLWPEIESMLFGREPGPDIRGVLEDRQKPIILSMARMDRIKNLSGLAELYGRSSRLRSLANLVIIGGHVDVQNSMDAEEREEIRRMHEIMDHYQLDGQMRWIGSQLDKTIVGELYRFVADGRGVFVQPALFEAFGLTVIEAMSSGLPVFATRHGGPLEIIEDGVSGFHIDPNDPEATAEKLADFLEAARERPKYWEEISDAALARVSERYTWERYAERLMTIARCFGFWRFVLSRESQVMERYLQMFRHLQWRPLAHAVPME

SEQ ID NO: 1175 - protein, 793 aa, Artificial Sequence
  engineered sucrose synthase encoded in plasmid pA32911
MIEELRQQLLDSPRSWRAFLRHLVASQRDSWLHTDLQRACKTFREQPPEGYPEDIGWLADFVAHTQEAIFRDPWMVFAWRLRPGVWEYVRIHVEQLAVEELSTDEYLQAKEQLVGLGAEGEAVLTVDFEDFRPVSQRLKDESTIGDGLTHLNRHIAGRLWTDLAAGRSQILEWLGLHRIDNQNLWWSNGNTDWDSLRQWLQYLGTIPRETPLAELREDMRRRGLEPGWGNTAGRIRETWRIWMDILDSPSPAAWESWLDRVPIISNVLIVSIHGWFAQDKVLGRPDTGGQVVYILDQARALEREMRNRLRQQGIDVEPRILIATRLIPESDGTTCDQRLEPVHGAENVQILRVPFRYEDGRIHPHWISRFKVWPYLERYASDLEREVKAELGSRPDLIIGNYSDGNLVATLLSEKLGVTQCNIAHALEKSKYLYSDLHWPDHEQDHHFACQFTADLIAMNAADIIVTSTYQEIAGNDREVGQYESHQDYTLPGLYRVENGIDVFDSKFNIVSPGADPRTYFSYARTEERFSSLWPEIESLLFGREPGPDIRGVLEDRQKPIILSMARMDRIKNLSGLAELYGRSSRLRSLANLVIIGGHVDVQNSMDAEEREEIRRMHEIMDHYQLDGQMRWVGSQLDKTVVGELYRVVADGRGVFVQPALFEAFGLTVIEAMSSGLPVFATRHGGPLEIIEDGVSGFHIDPNDPEATAEKLADFLEAARERPKYWEEISDAALARVSERYTWERYAERLMTIARIFGLWRFWLSRESQVMERYLQMFRHLQWRPLAHAVPME

SEQ ID NO: 1176 - protein, 793 aa, Artificial Sequence
  engineered sucrose synthase encoded in plasmid pA32915
MIEELRQQLLDSPRSWRAFLRHLVASQRDSWLHTDLQRACKTFREQPPEGYPEDIGWLADFVAHTQEAIFRDPWMVFAWRLRPGVWEYVRIHVEQLAVEELSTDEYLQAKEQLVGLGAEGEAVLTVDFEDFRPVSQRLKDESTIGDGLTHLNRHLAGRMWTDSAAGRSQLIEFLGLHRLDNQNLMWSNGNTDIDSARQTTQYLGTLPRETPLAEFREDLRRRGFEPGWGNTAGRIRETMRLLQDLLDSPSPAALESFLDRIPMISNVLIVSIHGWFAQDKVLGRPDTGGQVVYILDQARALEREMRNRLRQQGIDVEPRILIATRLIPESDGTTCDQRLEPVHGAENVQILRVPFRYEDGRIHPHWISRFKVWPYLERYASDLEREVKAELGSRPDLIIGNYSDGNLVATLLSEKLGVTQCNIAHALEKSKYLYSDLHWPDHEQDHHFACQFTADLIAMNAADIIVTSTYQEIAGNDREVGQYESHQDYTLPGLYRVENGIDVFDSKFNIVSPGADPRTYFSYARTEERFSSLWPEIESLLFGREPGPDIRGVLEDRQKPIILSMARMDRIKNLSGLAELYGRSSRLRSLANLVIIGGHVDVQNSMDAEEREEIRRMHEIMDHYQLDGQMRWVGSQLDKTVVGELYRVVADGRGVFVQPALFEAFGLTVIEAMSSGLPVFATRHGGPLEIIEDGVSGFHIDPNDPEATAEKLADFLEAARERPKYWEEISDAALARVSERYTWERYAERLMTIARAFGFWRFVLSRESQVMERYLQMFRHLQWRPLAHAVPME

SEQ ID NO: 1177 - protein, 793 aa, Artificial Sequence
  engineered sucrose synthase encoded in plasmid pA32920
MIEELRQQLLDSPRSWRAFLRHLVASQRDSWLHTDLQRACKTFREQPPEGYPEDIGWLADFVAHTQEAIFRDPWMVFAWRLRPGVWEYVRIHVEQLAVEELSTDEYLQAKEQLVGLGAEGEAVLTVDFEDFRPVSQRLKDESTIGDGLTHLNRHLAGRIWTDLAAGRSQILEFLGLHRLDNQNLMLSNGNTDFDSLRQTVQYLGTLPRETPWAEFREDMRRRGFEPGWGNTAGRVRETMRLLMDLLDSPSPAALESFLDRIPMISNILIVSIHGWFAQDKVLGRPDTGGQVVWILDQARALERELRNRLRQQGVDVEPRILIATRLIPESDGTTCDQRLEPVHGAENVQILRVPFRYEDGRIHPHWISRFKVWPYLERYASDLEREVKAELGSRPDVIIGNYSDGNLVATLLSEKLGVTQINVAHALEKSKYLYSDLHWPDHEQDHHFACQFTADLIAMNAADIIITSTYQEIAGNDREVGQYESHQDYTLPGLYRVENGIDVFDSKFNILSPGADPRTYFSYARTEERFSSLWPEIESLLFGREPGPDIRGVLEDRQKPIILSMARMDRIKNLSGLAELYGRSSRLRSLANLVIIGGHVDVQNSMDAEEREEIRRMHEIMDHYQLDGQMRWVGSQLDKTVVGELYRVVADGRGVFVQPALFEAFGLTVIEAMSSGLPVFATRHGGPLEIIEDGVSGFHIDPNDPEATAEKLADFLEAARERPKYWEEISDAALARVSERYTWERWAERWLTWVRCWGFWRFVLSRESQVMERYLQMFRHLQWRPLAHAVPME

SEQ ID NO: 1178 - protein, 793 aa, Artificial Sequence
  engineered sucrose synthase encoded in plasmid pA32927
MIEELRQQLLDSPRSWRAFLRHLVASQRDSWLHTDLQRACKTFREQPPEGYPEDIGWLADFVAHTQEAIFRDPWMVFAWRLRPGVWEYVRIHVEQLAVEELSTDEYLQAKEQLVGLGAEGEAVLTVDFEDFRPVSQRLKDESTIGDGLTHLNRHLAGRIWTDLAAGRSQILEFLGLHRLDNQNLMLSNGNTDFDSLRQTVQYLGTLPRETPWAEFREDMRRRGFEPGWGNTAGRVRETMRLLMDLLDSPSPAALESFLDRIPMISNVLIISIHGWFAQDKVLGRPDTGGQVVYILDQARALEREMRNRLRQQGVDVEPRIIIVTRLIPESDGTTCDQRLEPVHGAENVQILRIPFRYEDGRIHPHWISRFKVWPYLERWVSDVEREVKAELGSRPDLIIGNYSDGNLVATLISEKWGVTQCNIAHALEKSKYLYSDLHWPDHEQDHHFACQFTADLIAMNAADIIVTSTYQEIAGNDREVGQYESHQDYTLPGLYRVENGIDVFDSKFNIVSPGADPRTYFSYARTEERFSSLWPEIESLLFGREPGPDIRGVLEDRQKPIILSMARMDRIKNLSGLAELYGRSSRLRSLANLVIIGGHVDVQNSMDAEEREEIRRMHEIMDHYQLDGQMRWVGSQLDKTVVGELYRVVADGRGVFVQPALFEAFGLTVIEAMSSGLPVFATRHGGPLEIIEDGVSGFHIDPNDPEATAEKLADFLEAARERPKYWEEISDAALARVSERYTWERYAERLMTIARCFGFWRFVLSRESQVMERYLQMFRHLQWRPLAHAVPME

SEQ ID NO: 1179 - protein, 793 aa, Artificial Sequence
  engineered sucrose synthase encoded in plasmid pA32929
MIEELRQQLLDSPRSWRAFLRHLVASQRDSWLHTDLQRACKTFREQPPEGYPEDIGWLADFVAHTQEAIFRDPWMVFAWRLRPGVWEYVRIHVEQLAVEELSTDEYLQAKEQLVGLGAEGEAVLTVDFEDFRPVSQRLKDESTIGDGLTHLNRHLAGRIWTDLAAGRSQILEFLGLHRLDNQNLMLSNGNTDFDSLRQTVQYLGTLPRETPWAEFREDMRRRGFEPGWGNTAGRVRETMRLLMDLLDSPSPAALESFLDRIPMISNVIIISIHGWFAQDKVLGRPDTGGQVVYILDQARALEREMRNRLRQQGVDVEPRILIITRLIPESDGTTCDQRLEPVHGAENVQILRIPFRYEDGRIHPHWISRFKVWPYLERWVSDVEREIKAELGSRPDLIIGNYSDGNLVATLLSEKWGVTQCNIAHALEKSKYLYSDLHWPDHEQDHHFACQFTADLIAMNAADIIVTSTYQEIAGNDREVGQYESHQDYTLPGLYRVENGIDVFDSKFNIVSPGADPRTYFSYARTEERFSSLWPEIESLLFGREPGPDIRGVLEDRQKPIILSMARMDRIKNLSGLAELYGRSSRLRSLANLVIIGGHVDVQNSMDAEEREEIRRMHEIMDHYQLDGQMRWVGSQLDKTVVGELYRVVADGRGVFVQPALFEAFGLTVIEAMSSGLPVFATRHGGPLEIIEDGVSGFHIDPNDPEATAEKLADFLEAARERPKYWEEISDAALARVSERYTWERYAERLMTIARCFGFWRFVLSRESQVMERYLQMFRHLQWRPLAHAVPME

SEQ ID NO: 1180 - protein, 793 aa, Artificial Sequence
  engineered sucrose synthase encoded in plasmid pA32931
MIEELRQQLLDSPRSWRAFLRHLVASQRDSWLHTDLQRACKTFREQPPEGYPEDIGWLADFVAHTQEAIFRDPWMVFAWRLRPGVWEYVRIHVEQLAVEELSTDEYLQAKEQLVGLGAEGEAVWTIDLEDLRPVSQRLKDESTIGDGLTHLNRHLAGRIWTDLAAGRSQILEFLGLHRLDNQNLMLSNGNTDFDSLRQTVQYLGTLPRETPWAEFREDMRRRGFEPGWGNTAGRVRETMRLLMDLLDSPSPAALESFLDRIPMISNVLIVSIHGWFAQDKVLGRPDTGGQVVYILDQARALEREMRNRLRQQGVDVEPRILIATRLIPESDGTTCDQRLEPVHGAENVQILRVPFRYEDGRIHPHWISRFKVWPYLERYASDLEREVKAELGSRPDLIIGNYSDGNLVATLLSEKLGVTQCNIAHALEKSKYLYSDLHWPDHEQDHHFACQFTADWIAMNAADIIVTSTYQEIAGNDREVGQYESHQDYTLPGLYRVENGVDVFDSKFNIVSPGADPRTYFSYARTEERFSSLWPEIESLLFGREPGPDIRGVLEDRQKPIILSMARMDRIKNLSGLAELYGRSSRLRSLANLVIIGGHVDVQNSMDAEEREEIRRMHEIMDHYQLDGQMRWVGSQLDKTVVGELYRVVADGRGVFVQPALFEAFGLTVIEAMSSGLPVFATRHGGPLEIIEDGVSGFHIDPNDPEATAEKLADFLEAARERPKYWEEISDAALARVSERYTWERYAERLMTIARCFGFWRFVLSRESQVMERYLQMIRHLQWRPLAHAVPME

SEQ ID NO: 1181 - protein, 808 aa, Artificial Sequence
  engineered sucrose synthase encoded in plasmid pA34086
MTCVLLKAVVESDERADLRQFLRILQLQEKRYLLRNDILDAFADYCRDQERPVPPPSESRLSKLVFYTQEIIVDNESLCWIVRPRIAQQEVCRLHVEDLTIEPMTIPELLDLRDRLVNHYHPNEGDVFEIDVQPFYDYSPIIRDAKNIGKGVEFLNRYLSSKLFQDPRQWQQNLFNFLRIHRYNGYQLLINERIRSPQHLSEQVKQALVVLSDRPPTEPYSEFRFELQNLGFEPGWGNTVARVRDTLEILDQLLDSPDHQVLEAFVSRIPMIFRIALISPHGWFGQEGVLGRPDTGGQVVYILDQVRSLEKQMREDLELAGLDVLEAQPKIIVLTRLIPNAEGTTCNQRLEKIYGTNDAWILRVPFREFNPKVTQNWISRFEIWPYLETFAIDAERELRAEFGGVPDLIIGNYSDGNLVAFLLARRLKVTQCNIAHALEKSKYLFSNLYWQDLEDKYHFSLQFTADLIAMNAANFIISSTYQEIVGTPDSIGQYESYQSFTMPDLYHVVNGIELFSPKFNVVPPGVNEQVYFPYYHYTERLEGDRQRLEELLFTLEDPQQIYGYLEAPEKRPLFSMARLDRIKNLTGLAEAFGRSKALQERCNLILVAGKLRTADSSDREEIAEIEKLYQIIHQYNLHGKIRWLGIRLPKADSGEIYRIIADRQGIFVQPALFEAFGLTILEAMISGLPTFGTRFGGPLEIIQDGVNGFYINPTHLEEMAETIVRFLEACDRDPQEWQRISKAGIERVYSTYTWKIHCTRLLSLAKIYGFWNFVSQENREDMMRYMEALFHLLYKPRAQALLAEHLQR

SEQ ID NO: 1182 - protein, 808 aa, Artificial Sequence
  engineered sucrose synthase encoded in plasmid pA34087
MTCVLLKAVVESDERADLRQFLRILQLQEKRYLLRNDILDAFADYCRDQEKPVYPPSESRLSKLVFYTQEIIVDNESLCWIVRPRIAQQEVCRLHVEDLTIEPMTIPELLDLRDRLVNHYHPNEGDVFEIDVQPFYDYSPIIRDAKNIGKGVEFLNRYLSSKLFQDPRQWQQNLFNFLRIHRYNGYQLLINERIRSPQQLSEQVKQALKVLSDRPPDEPYSEFRFELQELGFEPGWGNTVARVRDTLEILDQLLDSPDHQVLEAFVSRIPMIFRIALISPHGWFGQEGVLGRPDTGGQVVYILDQVRSLEKQMREDLELAGLDVLEAQPKIIVLTRLIPNAEGTTCNQRLEKIYGTNNAWILRVPFREFNPKVTQNWISRFEIWPYLETFAIDAERELRAEFGGRPDLIIGNYSDGNLVAFLLARRLKVTQCNIAHALEKSKYLFSDLYWQDLEDKYHFSLQFTADLIAMNAANFIISSTYQEIVGTPDSIGQYESYQSFTMPDLYHVVNGIELFSPKFNVVPPGVNEQVYFPYYHYTERLEGDRQRLEELLFTLEDPQQIYGYLEAPEKRPLFSMARLDRIKNLTGLAEAFGRSKALQERCNLILVAGKLRTADSSDREEIAEIEKLYQIIHQYNLHGKIRWLGIRLPKADSGEIYRIIADRQGIFVQPALFEAFGLTILEAMISGLPTFGTRFGGPLEIIQDGVNGFYINPTHLEEMAETIVRFLEACDRDPQEWQRISKAGIERVYSTYTWKIHCTRLLSLAKIYGFWNFVSQENREDMMRYMEALFHLLYKPRAQALLAEHLQR

SEQ ID NO: 1183 - protein, 808 aa, Artificial Sequence
  engineered sucrose synthase encoded in plasmid pA34088
MTCVLLKAVVESDERADLRQFLRILQLQEKRYLLRNDILDAFEDYCRDQEKPVYPPSESRLSKLVFYTQEIIVDEESLCWIVRPRIAQQEVCRLHVEDLTIEPMTIPELLDLRDRLVNHYHPNEGDVFEIDVQPFYDYSPIIRDAKNIGKGVEFLNRYLSSKLFQDPRQWQQNLFNFLRIHRYNGQQLLINERIRSPQQLSEQVKQALKVLSDRPPDEPYSEFRFELQELGFEPGWGNTVARVRDTLEILDQLLDSPDHQVLEAFVSRIPMIFRIALISPHGWFGQEGVLGRPDTGGQVVYILDQVRSLEKQMREDLQLAGLDVLEAQPKIIVLTRLIPNAEGTTCNQRLEKIYGTNNAWILRVPFREFNPKVTQNWISRFEIWPYLETFAIDAERELRAEFGGRPDLIIGNYSDGNLVAFLLARRLKVTQCNIAHALEKSKYLFSDLYWQDLEDKYHFSLQFTADLIAMNAANFIISSTYQEIVGTPDSIGQYESYQSFTMPDLYHVVNGIELFSPKFNVVPPGVNEQVYFPYYHKEERLEGDRQRLEELLFTLEDPQQIYGYLEAPEKRPLFSMARLDRIKNLTGLAEAFGRSKALQERCNLILVAGKLRTADSSDREEIAEIEKLYQIIDQYNLHGKIRWLGIRLPKADSGEIYRIIADRQGIFVQPALFEAFGLTILEAMISGLPTFATRFGGPLEIIQDGVNGFYINPTHLEEMAETIVRFLEKCDRDPQEWQRISKAGIERVYSTYTWKIHTTRLLSLAKIYGFWNFVSQENREDMMRYMEALFHLLYKPRAQALLAEHLQR

SEQ ID NO: 1184 - protein, 808 aa, Artificial Sequence
  engineered sucrose synthase encoded in plasmid pA34089
MTCVLLKAVVESDERADLRQFLRILQLQEKRYLLRNDILDAFEDYCRDQEKPVYPPSESRLSKLVFYTQEIIVDEESLCWIVRPRIAQQEVCRLHVEDLTIEPMTIPELLDLRDRLVNHYHPNEGDVFEIDVQPFYDYSPIIRDPKNIGKGVEFLNRYLSSKLFQDPRQWQQNLFNFLRIHRYNGQQLLINERIRSPQQLSEQVKQALKVLSDRPPDEPYEEFRFELQELGFEPGWGNTVARVRDTLEILDQLLDSPDHQVLEAFVSRIPMIFRIALISPHGWFGQEGVLGRPDTGGQVVYILDQVRSLEKQMREDLQEAGLDVLEAQPKIIVLTRLIPNAEGTTCNQRLEKIYGTNNAWILRVPFREFNPKVTQNWISRFEIWPYLETFAIDAERELRAEFGGRPDLIIGNYSDGNLVAFLLARRLKVTQCNIAHALEKSKYLFSDLYWQDLEDKYHFSLQFTADLIAMNAANFIISSTYQEIVGTPDSIGQYESYQSFTMPDLYHVVNGIELFSPKFNVVPPGVNEQVYFPYYHKEERLEGDRQRLEELLFTLEDPQQIYGYLEAPEKRPLFSMARLDRIKNLTGLAEAYGRSKALQERCNLILVAGKLRTADSSDREEIAEIEKLYQIIDQYNLHGKIRWLGIRLPKADSGEIYRIIADRQGIFVQPALFEAFGLTILEAMISGLPTFATRFGGPLEIIQDGVNGFYINPTHLEEMAETIVRFLEKCDRDPQEWQRISQAAIERVYSTYTWKIHTTRLLSLAKIYGFWNFVSQENREDMMRYMEALFHLLYKPRAQALLAEHLQR

SEQ ID NO: 1185 - protein, 808 aa, Artificial Sequence
  engineered sucrose synthase encoded in plasmid pA34090
MTCVLLKAVVESDERAELRQFLRILRLKEKRYLLRNDILDAFEDYCRDQEKPVYPPSESSLSKLVFYTQEIIVDEESLCWIVRPRIARQEVCRLHVDDLTIEPMTIPELLDLRDRLVNHYHPNEGDVFEIDVQPFYDYSPIIRDPKNIGKGVEFLNRYLSSKLFQDPRQWQQNLFNFLRIHRYNGQQLLINERIRSPQQLSEQVKQALKILSDRPPDEPYEEFRFELQELGFEPGWGNTVARVRDTLEILDQLLDSPDHQVLEAFVSRIPMIFRIALISPHGWFGQEGVLGRPDTGGQVVYILDQVRSLEKQMREDLQEAGLDVLEAQPKIIVLTRLIPNAEGTTCNQRLEKIYGTDNAWILRVPFREFNPKVTQNWISRFEIWPYLETFAIDAERELRAEFGGRPDLIIGNYSDGNLVAFLLARRLKVTQCNIAHALEKSKYLFSDLYWQDLEDKYHFSLQFTADLIAMNAANFIISSTYQEIVGTPDSIGQYESYQSFTMPDLYHVVNGIELFSPKFNVVPPGVNENVYFPYYHKEERLEGDRQRLEELLFTLEDPQQIFGYLEHPEKRPLFSMARLDRIKNLTGLAEAYGRSKELQERCNLILVAGKLRVEDSSDREEIAEIEKLYQIIDQYNLHGKIRWLGIRLPKADSGEIYRIIADRQGIFVQPALFEAFGLTILEAMISGLPTFATRFGGPLEIIQDGVNGFYINPTHLEEMAETIVRFLEKCDRDPQEWQRISQAAIERVRSTYTWKIHTTRLLSLAKIYGFWNYVSQENREDMMRYMEALFHLLYKPRAQALLAEHLQR

SEQ ID NO: 1186 - protein, 808 aa, Artificial Sequence
  engineered sucrose synthase encoded in plasmid pA34091
MTCVLLKAVVESDERADLRQFSRILQLGEKRYLLRNDILDAFADYCRDQERPVPPPSESRLSKLVFYTQEIIVDNESLCWIVRPRIAQQEVCRLHVEDLTIEPMTIPELLDLRDRLVNHYHPNEGDVFEIDVQPFYDYSPIIRDAKNIGKGVEFLNRYLSSKLFQDPRQWQQNLFNFLRIHRYNGYQLLINERIRSPQHLSEQVKQALVVLSDRPPTEAYSEFRFELQNLGFEPGWGNTVARVRDTLEILDQLLDSPDHQVLEAFVSRIPMLFRIALISPHGWFGQEGVLGRPDTGGQVVYILDQVKSLEKQMREDLELAGLDVLEAQPKIIVLTRLIPNAEGTLCNQRLEKIYGTNDAWILRVPFREFNPKVTQNWISRFEIWPYLETFAIDAERELRAEFGHVPDLIIGNYSDGNLVAFLLARRLKVTQCNIAHALEKSKYLFSNLYWQDLEDKYHFSLQFTADLIAMNAANFIISSTYQEIVGTPDSIGQYESYQSFTMPDLYHVVNGIELFSPKFNVVPPGVNEQVYFPYYHYEERLEGDRQRLEELLFTLEDPQQIYGYLEAPEKRPLFSMARLDRIKNLTGLAEAFGRSKALQERCNLILVAGKLRTADSSDREEIAEIEKLYQIIHQYNLHGKIRWLGIRLPKADSGEIYRIIADRQGIFVQPALFEAFGLTILEAMISGLPTFATRFGGPLEIIQDGVNGFYINPTHLEEMAETIVRFLEACDRDPQEWQRISKAGIERVYSTYTWKIHCTRLLSLAKIYGFWNFSSQENREDMMRYMEALFHLLYKPRAQALLAEHLQR

SEQ ID NO: 1187 - protein, 808 aa, Artificial Sequence
  engineered sucrose synthase encoded in plasmid pA34092
MTCVLLKAVVESDERADLRQFSRILQRGEKRYLLRNDILDAFADYCRDQEKPVPPPSESRLSKLVFYTQEIIVDNESLCWIVRPRIAQQEVCRLHVEDLTIEPMTIPELLDLRDRLVNHYHPNEGDVFEIDVQPFYDYSPIIRDAKNIGKGVEFLNRYLSSKLFQDPRQWQQNLFNFLRIHRYNGYQLLINERIRSPQHLSEQVKQALKVLSDRPPDEAYSEFRFELQNLGFEPGWGNTVARVRDTLEILDQLLDSPDHQVLEAFVSRIPMLFRIALISPHGWFGQEGVLGRPDTGGQVVYILDQVRSLEKQMREDLELAGLDVLEAQPKIIVLTRLIPNAEGTLCNQRLEKIYGTNNAWILRVPFREFNPKVTQNWISRFEIWPYLETFAIDAERELRAEFGGRPDLIIGNYSDGNLVAFLLARRLKVTQCNIAHALEKSKYLFSNLYWQDLEDKYHFSLQFTADLIAMNAANFIISSTYQEIVGTPDSIGQYESYQSFTMPDLYHVVNGIELFSPKFNVVPPGVNEQVYFPYYHYEERLEGDRQRLEELLFTLEDPQQIYGYLEAPEKRPLFSMARLDRIKNLTGLAEAFGRSKALQERCNLILVAGKLRTADSSDREEIAEIEKLYQIIHQYNLHGKIRWLGIRLPKADSGEIYRIIADRQGIFVQPALFEAFGLTILEAMISGLPTFATRFGGPLEIIQDGVNGFYINPTHLEEMAETIVRFLEACDRDPQEWQRISKAGIERVYSTYTWKIHCTRLLSLAKIYGFWNFSSQENREDMMRYMEALFHLLYKPRAQALLAEHLQR

SEQ ID NO: 1188 - protein, 808 aa, Artificial Sequence
  engineered sucrose synthase encoded in plasmid pA34094
MTCVLLKAVVESDEREALRQFLRILQRSEKRYLLRNDILDAFADYCRDQEKPAPFPSSSRLSKLIFYTQEIIVDNESLCWIVRPRIAQQEVVRLHVEDLTIEPMTIPELLDARDRLVNHYHPNEGDVFEIDVQPFYDYSPIIRDAKNIGKGVEFLNRYLSSKLFQDPRQWQELLFNFLRIHRYNGQQLLINERIRSPQHLSEQVKQALKVLSDRPPDEAYEEFRFELQELGFEPGWGNTVARVRDTLEILDQLLDSPDHQVLEAFVSRIPMIFRIVLISPHGWFGQEGVLGRPDTGGQVVYILDQVRSLEKQMREDLELAGLDVLEAQPKIIVLTRLIPNAEGTTCNQRLEKIYGTENAWILRVPFREFNPKVTQNWISRFEIWPYLETFAIDAERELRAEFGGRPDLIIGNYSDGNLVAFLLARRLKVTQCNIAHALEKSKYLFSNLYWQDLEDKYHFSLQFTADLIAMNAADFIISSTYQEIVGTPDSIGQYESYQSFTMPDLYHVVNGIELFSPKFNVVPPGVNEEVYFPYYHKERRLEGDRQRLEELLFTLEDPQQIYGYLEAPEKRPLFSMARLDRIKNLTGLAEAFGRSKELQERCNLILVAGKLRTADSSDREEIAEIEKLYQIIEQYNLHGKIRWLGIRLPKADSGEIYRIIADRQGIFVQPALFEAFGLTILEAMISGLPTFATRFGGPLEIIQDGVNGFYINPTHLEEMAETIVRFLEKCDRDPQEWQRISKAAIERVYSTYTWKIHTTRLLSLAKIYGFWNFVSQENREDMMRYMEALFHLLYKPRAQALLAEHLQR

SEQ ID NO: 1189 - protein, 808 aa, Artificial Sequence
  engineered sucrose synthase encoded in plasmid pA34095
MTCVLLKAVVESDEREALRQFLRILQRGEKGYLLRNDILDAFDDYCRDQEKPAPFPSSSSLSKLIRYTQEIIVDNESLCWIVRPRIARQEVVRLHVEDLTIEPMTIPELLDARDRLVNHYHPNEGDVFEIDVQPFYDYSPIIRDPKNIGKGVEFLNRYLSSKLFQDPRQWQELLFNFLRIHRYNGQQLLINERIRSPQHLSEQVKQALKYLSDRPPDEAYEEFRFELQELGFEPGWGNTVARVRETLELLDQLLDSPDHQVLEAFVSRIPMIFRIALISPHGWFGQEGVLGRPDTGGQVVYILDQVRSLEKQMREDLKLAGLDVLEAQPKIIVLTRLIPNAEGTTCNQRLEKIYGTENAWILRVPFREFNPKVTQNWISRFEIWPYLETFAIDAERELRAEFGGRPDLIIGNYSDGNLVAFLLARRLKVTQCNIAHALEKTKYLFSNLYWQDLEDKYHFSLQFTADLIAMNAADFIISSTYQEIVGTPDSIGQYESYQSFTMPDLYHVVNGIELFSPKFNVVPPGVNEEVYFPYYRKERRLESDRQRLEELLFTLEDPQQIYGYLEHPEKRPLFSMARLDRIKNITGLAEAFGRNKELQERCNLILVAGKLRTEDSSDREEIAEIEKLYQIIEQYNLHGKIRWLGIRLPKADSGEIYRIIADRQGIFVQPALFEAFGLTILEAMISGLPTFATRFGGPLEIIQDGVNGFYINPTHLEEMAETIVRFLEKCDRDPQEWQRISQAAIERVRSTYTWKIHTTRLLSLAKIYGFWNFVSQENREDMMRYMEALFHLLYKPRAQALLAEHLQR

SEQ ID NO: 1190 - protein, 808 aa, Artificial Sequence
  engineered sucrose synthase encoded in plasmid pA34096
MTCVLLKAVVESDERADLRQFFRILQLQEKGYLLRNDILDAFADYCRDQERPVPPPSESRLSKLVFYTQEIIVDNESLCWIVRPRIAQQEVYRLHVEDLTIEPMTIPELLDLRDRLVNHYHPNEGDVFEIDVQPFYDYSPIIRDAKNIGKGVEFLNRYLSSKLFQDPRQWQQRLFNFLRIHRYNGYQLLINERIRSPQHLSEQVKQALVVLSDRPPTEAYSEFRFELQNLGFEPGWGNTVARVRDTLEILDQLLDSPDHQVLEAFVSRIPMIFRIALISPHGWFGQEGVLGRPDTGGQVVYILDQVKSLEKQMREDLELAGLDVLEAQPKIIVLTRLIPNAEGTLCNQRLEKIYGTNDAWILRVPFREFNPKVTQNWISRFEIWPYLETFAIDAERELRAEFGHVPDLIIGNYSDGNLVAFLLARRLKVTQCNIAHALEKSKYLFSNLYWQDLEDKYHFSLQFTADLIAMNAANFIISSTYQEIVGTPDSIGQYESYQSFTMPDLYHVVNGIELFSPKFNVVPPGVNEQVYFPYYHYEERLEGDRQRLEELLFTLEDPQQIYGYLEAPEKRPLFSMARLDRIKNLTGLAEAFGRSKALQERCNLILVAGKLRTADSSDREEIAEIEKLYQIIHQYNLHGKIRWLGIRLPKADSGEIYRIIADRQGIFVQPALFEAFGLTILEAMISGLPTFGTRFGGPLEIIQDGVNGFYINPTHLEEMAETIVRFLEACDRDPQEWQRISKAGIERVYSTYTWKIHTTRLLSLAKIYGFWNFVSQENREDMMRYMEALFHLLYKPRAQALLAEHLQR

SEQ ID NO: 1191 - protein, 808 aa, Artificial Sequence
  engineered sucrose synthase encoded in plasmid pA34097
MTCVLLKAVVESDERADLRQFFRILQLQEKGYLLRNDILDAFADYCRDQERPVPPPSESRLSKLVFYTQEIIVDNESLCWIVRPRIAQQEVYRLHVEDLTIEPMTIPELLDLRDRLVNHYHPNEGDVFEIDVQPFYDYSPIIRDAKNIGKGVEFLNRYLSSKLFQDPRQWQQRLFNFLRIHRYNGYQLLINERIRSPQHLSEQVKQALKVLSDRPPDEAYSEFRFELQNLGFEPGWGNTVARVRDTLEILDQLLDSPDHQVLEAFVSRIPMIFRIVLISPHGWFGQEGVLGRPDTGGQVVYILDQVRSLEKQMREDLELAGLEVLEAQPKIIVLTRLIPNAEGTLCNQRLEKIYGTNDAWILRVPFREFNPKVTQNWISRFEIWPYLETFAIDAERELRAEFGGRPDLIIGNYSDGNLVAFLLARRLKVTQCNIAHALEKSKYLFSNLYWQDLEDKYHFSLQFTADLIAMNAANFIISSTYQEIVGTPDSIGQYESYQSFTMPDLYHVVNGIELFSPKFNVVPPGVNEQVYFPYYHYEERLEGDRQRLEELLFTLEDPQQIYGYLEAPEKRPLFSMARLDRIKNLTGLAEAFGRSKALQERCNLILVAGKLRTADSSDREEIAEIEKLYQIIDQYNLHGKIRWLGIRLPKADSGEIYRIIADRQGIFVQPALFEAFGLTILEAMISGLPTFATRFGGPLEIIQDGVNGFYINPTHLEEMAETIVRFLEACDRDPQEWQRISKAGIERVYSTYTWKIHTTRLLSLAKIYGFWNFVSQENREDMMRYMEALFHLLYKPRAQALLAEHLQR

SEQ ID NO: 1192 - protein, 808 aa, Artificial Sequence
  engineered sucrose synthase encoded in plasmid pA34098
MTCVLLKAWWESDERADLRQFFRILQLQEKGYLLRNDILDAFADYCRDQERPVPPPSESRLSKLVFYTQEIIVDNESLCWIVRPRIAQQEVWRLHVEDLTIEPMTIPELLDLRDRLVNHYHPNEGDVFEIDVQPFYDYSPIIRDAKNIGKGVEFLNRYLSSKLFQDPRQWQQRLFNFLRIHRYNGYQLLINERIRSPQHLSEQVKQALKVLSDRPPDEAYEEFRFELQNLGFEPGWGNTVARVRDTLEILDQLLDSPDHQVLEAFVSRIPMIFRIVLISPHGWFGQEGVLGRPDTGGQVVYILDQVRSLEKQMREDLEEAGLDVLEIQPKIIVLTRLIPNAEGTTCNQRLEKIYGTNHAWILRVPFREFNPKVTQNWISRFEIWPYLETFAIDAERELRAEFGGRPDLIIGNYSDGNLVAFLLARRLKVTQCNIAHALEKSKYLFSDLYWQDLEDKYHFSLQFTADLIAMNAADFIISSTYQEIVGTPDSIGQYESYQSFTMPDLYHVVNGIELFSPKFNVVPPGVNEQVYFPYYHKEERLEGDRQRLEELLFTLEDPQQIYGYLEAPEKRPLFSMARLDRIKNLTGLAEAFGRSKALQERCNLILVAGKLRTADSSDREEIAEIEKLYQIIDQYNLHGKIRWLGIRLPKADSGEIYRIIADRQGIFVQPALFEAFGLTILEAMISGLPTFATRFGGPLEIIQDGVNGFYINPTHLEEMAETIVRFLEKCDRDPQEWQRISKAGIERVYSTYTWKIHTTRLLSLAKIYGFWNFVSQENREDMMRYLEALFHLLYKPRAQALLAEHLQR

SEQ ID NO: 1193 - protein, 808 aa, Artificial Sequence
  engineered sucrose synthase encoded in plasmid pA34099
MTCVLLKAVVESDERADLRQFLRILQLQEKGYLLRNDILDAFEDYCRDQERPVPPPSESRLSKLVHYTQEIIVDNESLCWIVRPRIAQQEVWRLHVEDLTIEPMTIPELLDLRDRLVNHYHPNEGDVFEIDVQPFYDYSPIIRDAKNIGKGVEFLNRYLSSKLFQDPRQWQQRLFNFLRIHRYNGYQLLINERIRSPQHLSEQVKQALKVLSDRPPDEPYEEFRFELQNLGFEPGWGNTVARVRDTLEILDQLLDSPDHQVLEAFVSRIPMIFRIVLISPHGWFGQEGVLGRPDTGGQVVYILDQVRSLEKQMREDLEEAGLDVLEIQPKIIVLTRLIPNAEGTTCNQRLEKIYGTNNAWILRVPFREFNPKVTQNWISRFEIWPYLETFAIDAERELRAEFGGRPDLIIGNYSDGNLVAFLLARRLKVTQCNIAHALEKSKYLFSDLYWQDLEDKYHFSLQFTADLIAMNAADFIISSTYQEIVGTPDSIGQYESYQSFTMPDLYHVVNGIELFSPKFNVVPPGVNEEVYFPYYHKERRLEGDRQRLEELLFTLEDPQQIYGYLEAPEKRPLFSMARLDRIKNLTGLAEAFGRSKALQERCNLILVAGKLRTEDSSDREEIAEIEKLYQIIDQYNLHGKIRWLGIRLPKADSGEIYRIIADRQGIFVQPALFEAFGLTILEAMISGLPTFATRFGGPLEIIQDGVNGFYINPTHLEEMAETIVRFLEKCDRDPQEWQRISQAGIERVYSTYTWKIHTTRLLSLAKIYGFWNFVSQENREDMMRYLEALFHLLYKPRAQALLAEHLQR

SEQ ID NO: 1194 - protein, 808 aa, Artificial Sequence
  engineered sucrose synthase encoded in plasmid pA34100
MTCVLLKAWWESDERNALRQFLRILALGEKGYLLRNDILDAFEDYCKDQERPEPPPSSSRLSKLVHYTQEIIVDNESLCFIVRPRIAQQEVCRLHVDDLTIEPMTIPELLDLRDRLVNHYHPNEGDVFEIDVQPFYDYSPIIRDPKNIGKGVEFLNRYLSSKLFQDPRQWQQRLFNFLRIHRYNGVQLLINERIRSPQQLSEQVKQALKVLSDRPPDEPYEEFRFELQNLGFEPGWGNTVARVRDTLEILDQLLDSPDHQVLEAFVSRIPMIFRIVLISPHGWFGQEGVLGRPDTGGQVVYILDQVRSLEKQMREDLEEAGLDVLEIQPKIIVLTRLIPNAEGTTCNQRLEKIYGTNNAWILRVPFREFNPKVTQNWISRFEIWPYLETFAIDAERELRAEFGGRPDLIIGNYSDGNLVAFLLARRLKVTQCNIAHALEKTKYLFSDLYWQDLEDKYHFSLQFTADLIAMNAADFIISSTYQEIVGTPDSIGQYESYQSFTMPDLYHVVNGIELFHPKFNVVPPGVNEEVYFPYYHKERRLESDRQRLEELLFTLEDPQQIYGYLEHPEKRPLFSMARLDRIKNLTGLAEAFGRSPRLQERCNLIIVAGKLRTEDSSDREEIAEIEKLYQIIDQYNLHGKIRWLGIRLPKADSGEIYRIIADRQGIFVQPALFEAFGLTILEAMISGLPTFATRFGGPLEIIQDGVNGFYINPTHLEEMAETIVRFLEKCDRDPQEWQRISQAAIERVYSTYTWKIHTTRLLSLAKIYGFWNFVSQENREDMMRYLEALFHLLYKPRAQALLAEHLQR

SEQ ID NO: 1195 - protein, 808 aa, Artificial Sequence
  engineered sucrose synthase encoded in plasmid pA34101
MTCVLLKAVVESDERADLRQFSRILQLGEKRYLLRNDILDAFADYCRDQERPVPFPSESRLSKLVFYTQEIIVDNESLCWIVRPRIAQQEVCRLHVEDLTIEPMTIPELLDLRDRLVNHYHPNEGDVFEIDVQPFYDYSPIIRDAKNIGKGVEFLNRYLSSKLFQDPRQWQQNLFNFLRIHRYNGIQLLINERIRSPQHLSEQVKQALVVLSDRPPTEAYSEFRFELQNLGFEPGWGNTVARVRDTLEILDQLLDSPDHQVLEAFVSRIPMLFRIALISPHGWFGQEGVLGRPDTGGQVVYILDQVKSLEKQMREDLELAGLDVLEAQPKIIVLTRLIPNAEGTLCNQRLEKIYGTNDAWILRVPFREFNPKVTQNWISRFEIWPYLETFAIDAERELRAEFGGVPDLIIGNYSDGNLVAFLLARRLKVTQCNIAHALEKSKYLFSNLYWQDLEDKYHFSLQFTADLIAMNAADFIISSTYQEIVGTPDSIGQYESYQSFTMPDLYHVVNGIELFSPKFNVVPPGVNEQVYFPYYHYTERLEGDRQRLEELLFTLEDPQQIYGYLEAPEKRPLFSMARLDRIKNLTGLAEAFGRSKALQERCNLILVAGKLRTADSSDREEIAEIEKLYQIIHQYNLHGKIRWLGIRLPKADSGEIYRIIADRQGIFVQPALFEAFGLTILEAMISGLPTFGTRFGGPLEIIQDGVNGFYINPTHLEEMAETIVRFLEACDRDPQEWQRISKAGIERVYSTYTWKIHCTRLLSLAKIYGFWNFSSQENREDMMRYMEALFHLLYKPRAQALLAEHLQR

SEQ ID NO: 1196 - protein, 808 aa, Artificial Sequence
  engineered sucrose synthase encoded in plasmid pA34102
MTCVLLKAVVESDERADLRQFSRILQLGEKRYLLRNDILDAFADYCRDQERPEPFPSESRLSKLVFYTQEIIVDNESLCWIVRPRIAQQEVCRLHVEDLTIEPMTIPELLDLRDRLVNHYHPNEGDVFEIDVQPFYDYSPIIRDAKNIGKGVEFLNRYLSSKLFQDPRQWQQNLFNFLRIHRYNGIQLLINERIRSPQHLSEQVKQALKVLSDRPPDEPYSEFRFELQNLGFEPGWGNTVARVRDTLEILDQLLDSPDHQVLEAFVSRIPMLFRIALISPHGWFGQEGVLGRPDTGGQVVYILDQVRSLEKQMREDLELAGLDVLEAQPKIIVLTRLIPNAEGTLCNQRLEKIYGTNDAWILRVPFREFNPKVTQNWISRFEIWPYLETFAIDAERELRAEFGGVPDLIIGNYSDGNLVAFLLARRLKVTQCNIAHALEKSKYLFSNLYWQDLEDKYHFSLQFTADLIAMNAADFIISSTYQEIVGTPDSIGQYESYQSFTMPDLYHVVNGIELFSPKFNVVPPGVNEQVYFPYYHYEERLEGDRQRLEELLFTLEDPQQIYGYLEAPEKRPLFSMARLDRIKNLTGLAEAFGRSKALQERCNLILVAGKLRTADSSDREEIAEIEKLYQIIHQYNLHGKIRWLGIRLPKADSGEIYRIIADRQGIFVQPALFEAFGLTILEAMISGLPTFGTRFGGPLEIIQDGVNGFYINPTHLEEMAETIVRFLEACDRDPQEWQRISKAGIERVYSTYTWKIHCKRLLSLAKIYGFWNFSSQENREDMMRYMEALFHLLYKPRAQALLAEHLQR

SEQ ID NO: 1197 - protein, 808 aa, Artificial Sequence
  engineered sucrose synthase encoded in plasmid pA34103
MTCVLLKAVVESDERADLRQFSRILQLGEKRYLLRNDILDAFADYCRDQERPEPFPHESRLSKLVFYTQEIIVDNESLCWIVRPRIAQQEVCRLHVEDLTIEPMTIPELLDLRDRLVNHYHPNEGDVFEIDVQPFYDYSPIIRDAKNIGKGVEFLNRYLSSKLFQDPRQWQQNLFNFLRIHRYNGIQLLINERIRSPQHLSEQVKQALKVLSDRPPDEPYSEFRFELQELGFEPGWGNTVARVRDTLEILDQLLDSPDHQVLEAFFSRIPMLFRIALISPHGWFGQEGVLGRPDTGGQVVYILDQVRSLEKQMREDLELAGLDVLEIQPKIIVLTRLIPNAEGTLCNQRLEKIYGTNDAWILRVPFREFNPKVTQNWISRFEIWPYLETFAIDAERELRAEFGGRPDLIIGNYSDGNLVAFLLARRLKVTQCNIAHALEKSKYLFSNLYWQDLEDKYHFSLQFTADLIAMNAADFIISSTYQEIVGTPDSIGQYESYQSFTMPDLYHVVNGIELFSPKFNVVPPGVNEQVYFPYYRYEERLEGDRQRLEELLFTLEDPQQIYGYLEAPEKRPLFSMARLDRIKNLTGLAEAFGRSKALQEKCNLILVAGKLRTADSSDREEIAEIEKLYQIIDQYNLHGKIRWLGIRLPKADSGEIYRIIADRQGIFVQPALFEAFGLTILEAMISGLPTFGTRFGGPLEIIQDGVNGFYINPTHLEEMAETIVRFLEKCDRDPQEWQRISKAGIERVYSTYTWKIHCKRLLSLAKIYGFWNFSSQENREDMMRYMEALFHLLYKPRAQALLAEHLQR

SEQ ID NO: 1198 - protein, 808 aa, Artificial Sequence
  engineered sucrose synthase encoded in plasmid pA34104
MTCVLLKAVVESDERADLRQFIRILQLGEKRYLLRNDILDAFADYCRDQERPEPFPHSSRLSKLVHYTQEIIVDNESLCWIVRPRIAQQEVCRLHVEDLTIEPMTIPELLDLRDRLVNHYHPNEGDVFEIDVQPFYDYSPIIRDPKNIGKGVEFLNRYLSSKLFQDPRQWQQKLFNFLRIHRYNGIQLLINERIRSPQHLSEQVKQALKVLSDRPPDEPYSEFRFELQELGFEPGWGNTVARVRDTLEILDQLLDSPDHQVLEAFVSRIPMLFRIALISPHGWFGQEGVLGRPDTGGQVVYILDQVRSLEKQMREDLELAGLDVLEIQPKIIVLTRLIPNAEGTTCNQRLEKIYGTEDAWILRVPFREFNPKVTQNWISRFEIWPYLETFAIDAERELRAEFGGRPDLIIGNYSDGNLVAFLLARRLKVTQCNIAHALEKTKYLFSNLYWQDLEDKYHFSLQFTADLIAMNAADFIISSTYQEIVGTPDSIGQYESYQSFTMPDLYHVVNGIELFSPKFNVVPPGVNEQVYFPYYRKEERLEGDRQRLEELLFTLEDPQQIYGYLEDPEKRPLFSMARLDRIKNLTGLAEAFGRSKALQERCNLILVAGKLRTEDSSDREEIAEIEKLYQIIDQYNLHGKIRWLGIRLPKADSGEIYRIIADRQGIFVQPALFEAFGLTILEAMISGLPTFATRFGGPLEIIQDGVNGFYINPTHLEEMAETIVRFLEKCDRDPQEWQRISKAAIERVYSTYTWKIHAKRLLSLAKIYGFWNFSSQENREDMMRYMEALFHLLYKPRAQALLAEHLQR

SEQ ID NO: 1199 - protein, 808 aa, Artificial Sequence
  engineered sucrose synthase encoded in plasmid pA34105
MTCVLLKAVVESDERAALRQFIRILDRGEKGYLLRNDILDAFADYCRDQERPAPFYHSSRLSKLVHYTQEIIVDNESLCWIVRPRIARQEVVRLHVEDLTIEPMTIPELLDLRDRLVNHYHPNEGDVFEIDVQPFYDYSPIIRDPKNIGKGVEFLNRYLSSKLFQDPRQWQQRLFNFLRIHRYNGIQLLINERIRSPQHLSEQVKQALKVLSDRPPDEPYEEFRFELQELGFEPGWGNTVARVRETLEILDQLLDSPDHQVLEAFLSRIPMIFRIALISPHGWFGQEGVLGRPDTGGQVVYILDQVRALEKQMREDLELAGLDVLEIQPKIIVLTRLIPNAEGTTCNQRLEKIYGTENAWILRVPFREFNPKVTQNWISRFEIWPYLETFAIDAERELRAEFGGRPDLIIGNYSDGNLVAFLLARRLKVTQCNIAHALEKTKYLFSDLYWQDLEDKYHFSLQFTADLIAMNAADFIISSTYQEIVGTPDSIGQYESYQSFTMPDLYHVVNGIELFSPKFNVVPPGVNEQVYFPYTRKERRLESDRQRLEELLFTLEDPQQIVGYLEDPEKRPLFSMARLDRIKNLTGLAEAFGRSKELQEHCNLILVAGKLRTEDSSDREEIAEIEKLYQIIDQYNLHGKIRWLGIRLPKADSGEIYRIIADRQGIFVQPALFEAFGLTILEAMISGLPTFATRFGGPLEIIQDGVNGFYINPTHLEEMAETIVRFLEKCDRDPQEWQRISQAAIERVYSTYTWKIHAKRLLSLAKIYGFWNFSSQENREDMMRYMEALFHLLYKPRAQALLAEHLQR

SEQ ID NO: 1200 - protein, 808 aa, Artificial Sequence
  engineered sucrose synthase encoded in plasmid pA34106
MTCVLLKAVVESDERADLRQFSRILQLGEKRYLLRNDILDAFEDYCRDQERPEPPPSESRLSKLVFYTQEIIVDNESLCWIVRPRIAQQEVYRLHVEDLTIEPMTIPELLDLRDRLVNHYHPNEGDVFEIDVQPFYDYSPIIRDAKNIGKGVEFLNRYLSSKLFQDPRQWQQNLFNFLRIHRYNGYQLLINERIRSPQHLSEQVKQALVVLSDRPPTEPYSEFRFELQNLGFEPGWGNTVARVRDTLEILDQLLDSPDHQVLEAFVSRIPMIFRIALISPHGWFGQEGVLGRPDTGGQVVYILDQVRSLEKQMREDLELAGLGVLEAQPKIIVLTRLIPNAEGTLCNQRLEKIYGTNDAWILRVPFREFNPKVTQNWISRFEIWPYLETFAIDAERELRAEFGHVPDLIIGNYSDGNLVAFLLARRLKVTQCNIAHALEKSKYLFSNLYWQDLEDKYHFSLQFTADLIAMNAANFIISSTYQEIVGTPDSIGQYESYQSFTMPDLYHVVNGIELFSPKFNVVPPGVNEQVYFPYYHYEERLEGDRQRLEELLFTLEDPQQIYGYLEDPEKRPLFSMARLDRIKNLTGLAEAFGRSKALQERCNLILVAGKLRTADSSDREEIAEIEKLYQIIDQYNLHGKIRWLGIRLPKADSGEIYRIIADRQGIFVQPALFEAFGLTILEAMISGLPTFATRFGGPLEIIQDGVNGFYINPTHLEEMAETIVRFLEACDRDPQEWQRISKAGIERVYSTYTWKIHCTRLLSLAKIYGFWNFSSQENREDMMRYMEALFHLLYKPRAQALLAEHLQR

SEQ ID NO: 1201 - protein, 808 aa, Artificial Sequence
  engineered sucrose synthase encoded in plasmid pA34107
MTCVLLKAVVESDEREDLRQFLRILQLGEKRYLLRNDILDAFEDYCRDQERPEPPPSESRLSKLVFYTQEIIVDNEWLCWIVRPRIAQQEVYRLHVEDLTIEPMTIPELLDLRDRLVNHYHPNEGDVFEIDVQPFYDYSPIIRDAKNIGKGVEFLNRYLSSKLFQDPRQWQQNLFNFLRIHRYNGQQLLINERIRSPQQLSEQVKQALKVLSDRPPDEPYSEFRFELQNLGFEPGWGNTVARVRDTLEILDQLLDSPDHQVLEAFVSRIPMIFRIALISPHGWFGQEGVLGRPDTGGQVVYILDQVRSLEKQMREDLELAGLGVLEAQPKIIVLTRLIPNAEGTLCNQRLEKIYGTNDAWILRVPFREFNPKVTQNWISRFEIWPYLETFAIDAERELRAEFGHVPDLIIGNYSDGNLVAFLLARRLKVTQCNIAHALEKSKYLFSNLYWQDLEDKYHFSLQFTADLIAMNAANFIISSTYQEIVGTPDSIGQYESYQSFTMPDLYHVVNGIELFSPKFNVVPPGVNEQVYFPYYHYEERLEGDRQRLEELLFTLEDPQQIYGYLENPEKRPLFSMARLDRIKNLTGLAEAFGRSKALQERCNLILVAGKLRTADSSDREEIAEIEKLYQIIDQYNLHGKIRWLGIRLPKADSGEIYRIIADRQGIFVQPALFEAFGLTILEAMISGLPTFATRFGGPLEIIQDGVNGFYINPTHLEEMAETIVRFLEACDRDPQEWQRISKAGIERVYSTYTWKIHCTRLLSLAKIYGFWNFSSQENREDMMRYMEALFHLLYKPRAQALLAEHLQR

SEQ ID NO: 1202 - protein, 808 aa, Artificial Sequence
  engineered sucrose synthase encoded in plasmid pA34109
MTCVLLKAVVESDEREDLRQFLRILQLGEKRYLLRNDILDAFEDYCRDQERPEPPPSESRLSKLVFYTQEIIVDNEWLCWIVRPRIAQQEVYRLHVEDLTIEPMTIPELLDLRDRLVNHYHPNEGDVFEIDVQPFYDYSPIIRDPKNIGKGVEFLNRYLSSKLFQDPRQWQENLFNFLRIHRYNGQQLLINDRIRSPQQLSEQVKQALKVLSDRPPDEPYSEFRFELQNLGFEPGWGNTVARVRDTLEILDQLLDSPDHQVLEAFLSRIPMIFRIALISPHGWFGQEGVLGRPDTGGQVVYILDQVRSLEKQMREDLELAGLGVLEAQPKIIVLTRLIPNAEGTLCNQRLEKIYGTNNAWILRVPFREFNPKVTQNWISRFEIWPYLETFAIDAERELRAEFGGVPDLIIGNYSDGNLVAFLLARRLKVTQCNIAHALEKSKYLFSNLYWQDLEDKYHFSLQFTADLIAMNAADFIISSTYQEIVGTPDSIGQYESYQSFTMPDLYHVVNGIELFSPKFNVVPPGVNEQVYFPYYHKEERLEGDRQRLEELLFTLEDPQQIYGYLENPEKRPLFSMARLDRIKNLTGLAEAFGRSKALQERCNLILVAGKLRTADSSDREEIAEIEKLYQIIDQYNLHGKIRWLGIRLPKADSGEIYRIIADRQGIFVQPALFEAFGLTILEAMISGLPTFATRFGGPLEIIQDGVNGFHINPTHLEEMAETIVRFLEKCDRDPQEWQRISEAGIERVYSTYTWKIHAKRLLSLAKIYGFWNFSSQENREDMMRYMEALFHLLYKPRAQALLAEHLQR

SEQ ID NO: 1203 - protein, 808 aa, Artificial Sequence
  engineered sucrose synthase encoded in plasmid pA34110
MTCVLLKAVLESDEREDLRQFLRILQLSEKGYLLRNDILDAFEDYCRDQERPEPPYSESRLSKLVFYTQEIIVDNEWLCWIVRPRIAQQEVYRLHVEDLTIEPMTIPELLDLRDRLVNHYHPNEGDVFEIDVQPFYDYSPIIRDPKNIGRGVEFLNRYLSSKLFQDPRQWQENLFNFLRIHRYNGQQLLINDRIRSPQQLSEQVKQALKVLSDRPPDEPYEEFRFELQELGFEPGWGNTVARVRDTLEILDQLLDSPDHQVLEAFLSRIPMIFRIALISPHGWFGQEGVLGRPDTGGQVVYILDQVRALEKQMREDLKLAGLGVLEAQPKIIVLTRLIPNAEGTLCNQRLEKIYGTENAWILRVPFREFNPKVTQNWISRFEIWPYLETFAIDAERELRAEFGGRPDLIIGNYSDGNLVAFLLARRLKVTQCNIAHALEKTKYLFSNLYWQDLEDKYHFSLQFTADLIAMNAADFIISSTYQEIVGTPDSIGQYESYQSFTMPDLYHVVNGIELFSPKFNVVPPGVNENVYFPYYHKEERLEGDRQRLEELLFTLEDPQQIYGYLENPEKRPLFSMARLDRIKNLTGLAEAFGRSKELQERCNLILVAGKLRTEDSTDREEIAEIEKLYQIIDQYNLHGKIRWLGIRLPKADSGEIYRIIADRQGIFVQPALFEAFGLTILEAMISGLPTFATRFGGPLEIIQDGVNGFHINPTHLEEMAETIVRFLEKCDRDPQEWQRISQAGIERVYSTYTWKIHAKRLLSLAKIYGFWNFSSQENREDMMRYMEALFHLLYKPRAQALLAEHLQR

SEQ ID NO: 1204 - protein, 808 aa, Artificial Sequence
  engineered sucrose synthase encoded in plasmid pA34111
MTCVLLKAVVESDERADLRQFLRILQLGEKRYLLRNDILDAFADYCRDQERPVPPPHESRLSKLVFYTQEIIVDNESLWWIVRPRIAQQEVCRLLVEDLTIEPMTIPELLDLRDRLVNHYHPNEGDVFEIDVQPFYDYSPIIRDAKNIGKGVEFLNRYLSSKLFQDPRQWQQNLFNFLRIHRYNGQQLLINERIRSPQHLSEQVKQALVVLSDRPPTEAYSEFRFELQNLGFEPGWGNTVARVRDTLEILDQLLDSPDHQVLEAFVSRIPMLFRIALISPHGWFGQEGVLGRPDTGGQVVYILDQVKSLEKQMREDLELAGLGVLEAQPKIIVLTRLIPNAEGTLCNQRLEKIYGTNHAWILRVPFREFNPKVTQNWISRFEIWPYLETFAIDAERELRAEFGHVPDLIIGNYSDGNLVAFLLARRLKVTQCNIAHALEKSKYLFSNLYWQDLEDKYHFSLQFTADLIAMNAANFIISSTYQEIVGTPDSIGQYESYQSFTMPDLYHVVNGIELFSPKFNVVPPGVNEQVYFPYYHYTERLEGDRQRLEELLFTLEDPQQIYGYLENPEKRPLFSMARLDRIKNLTGLAEAFGRSKALQERCNLILVAGKLRTADSSDREEIAEIEKLYQIIHQYNLHGKIRWLGIRLPKADSGEIYRIIADRQGIFVQPALFEAFGLTILEAMISGLPTFGTRFGGPLEIIQDGVNGFYINPTHLEEMAEKIVRFLEACDRDPQEWQRISKAGIERVYSTYTWKIHCTRLLSLAKIYGFWNFVSQENREDMMRYMEALFHLLYKPRAQALLAEHLQR

SEQ ID NO: 1205 - protein, 808 aa, Artificial Sequence
  engineered sucrose synthase encoded in plasmid pA34112
MTCVLLKAVVESDERADLRQFLRILQLGEKRYLLRNDILDAFADYCRDQERPVPPPHESRLSKLVFYTQEIIVDNESLWWIVRPRIAQQEVCRLLVEDLTIEPMTIPELLDLRDRLVNHYHPNEGDVFEIDVQPFYDYSPIIRDPKNIGKGVEFLNRYLSSKLFQDPRQWQQNLFNFLRIHRYNGQQLLINERIRSPQQLSEQVKQALKWLSDRPPTEAYSEFRFELQNLGFEPGWGNTVARVRDTLEILDQLLDSPDHQVLEAFVSRIPMIFRIALISPHGWFGQEGVLGRPDTGGQVVYILDQVKSLEKQMREDLELAGLDVLEAQPKIIVLTRLIPNAEGTLCNQRLEKIYGTNHAWILRVPFREFNPKVTQNWISRFEIWPYLETFAIDAERELRAEFGHVPDLIIGNYSDGNLVAFLLARRLKVTQCNIAHALEKSKYLFSNLYWQDLEDKYHFSLQFTADLIAMNAANFIISSTYQEIVGTPDSIGQYESYQSFTMPDLYHVVNGIELFSPKFNVVPPGVNEQVYFPYYHYTERLEGDRQRLEELLFTLEDPQQIYGYLENPEKRPLFSMARLDRIKNLTGLAEAFGRSKALQERCNLILVAGKLRTADSSDREEIAEIEKLYQIIDQYNLHGKIRWLGIRLPKADSGEIYRIIADRQGIFVQPALFEAFGLTILEAMISGLPTFGTRFGGPLEIIQDGVNGFYINPTHLEEMAEKIVRFLEACDRDPQEWQRISKAGIERVYSTYTWKIHCTRLLSLAKIYGFWNFVSQENREDMMRYMEALFHLLYKPRAQALLAEHLQR

SEQ ID NO: 1206 - protein, 808 aa, Artificial Sequence
  engineered sucrose synthase encoded in plasmid pA34113
MTCVLLKAVVESDERADLRQFLRILQLGGKRYLLRNDILDAFADYCRDQERPVPPPHESRLSKLVFYTQEIIVDNESLWWIVRPRIAQQEVCRLHVEDLTIEPMTIPELLDLRDRLVNHYHPNEGDVFEIDVQPFYDYSPIIRDPKNIGKGVEFLNRYLSSKLFQDPRQWQQNLFNFLRIHRYNGQQLLINERIRSPQQLSEQVKQALKWLSDRPPDEPYSEFRFELQNLGFEPGWGNTVARVRDTLEILDQLLDSPDHQVLEAFVSRIPMIFRIALISPHGWFGQEGVLGRPDTGGQVVYILDQVKSLEKQMREDLELAGLDVLEAQPKIIVLTRLIPNAEGTRCNQRLEKIYGTNHAWILRVPFREFNPKVTQNWISRFEIWPYLETFAIDAERELRAEFGHVPDLIIGNYSDGNLVAFLLARRLKVTQCNIAHALEKSKYLFSNLYWQDLEDKYHFSLQFTADLIAMNAANFIISSTYQEIVGTPDSIGQYESYQSFTMPDLYHVVNGIELFSPKFNVVPPGVNEQVYFPYYETERRLEGDRQRLEELLFTLEDPQQIYGYLENPEKRPLFSMARLDRIKNLTGLAEAFGRSKALQERCNLILVAGKLRTADSSDREEIAEIEKLYQIIDQYNLHGKIRWLGIRLPKADSGEIYRIIADRQGIFVQPALFEAFGLTILEAMISGLPTFGTRFGGPLEIIQDGVNGFYINPTHLEEMAEKIVRFLEACDRDPQEWQRISKAGIERVYSTYTWKIHCTRLLSLAKIYGFWNFVSQENREDMWRYLEALFHLLYKPRAQALLAEHLQR

SEQ ID NO: 1207 - protein, 808 aa, Artificial Sequence
  engineered sucrose synthase encoded in plasmid pA34115
MTCVLLKAMWESDEREDLRQFLRILQAGGKRYLLRNDILDAFADYCRDQERPVPPPHESRLAKLVYYTQEIIVDNESLWWIVRPRIAQQEVCRLHVEDLTVEPMTIPELLDLRDRLVNHYHPNEGDVFEIDVQPFYDYFPHIRDPKNIGKGVEFLNRYLSSKLFQDPRQWQQKLFNFLRIHRYNGQQLLINERIRSPQQLSEQVKQALKWLSDRPPDEPYEEFRFELQNLGFEPGWGKTVARVRETLEILLQLLDSPDHQVLEAFLSRIPMIFRIALISPHGWFGQENVLGRPDTGGQVVYILDQVRALEKQMREDLELAGLDVLEAQPKIIVLTRLIPNAEGTTCNQRLEKIYGTDHAWILRVPFREFNPKVTQNWISRFEIWPYLETFAIDAERELRAEFGHVPDLIIGNYSDGNLVAFLLARRLKVTQCNIAHALEKSKYLFSNLYWQDLEDKYHFSLQFTADLIAMNAADFIISSTYQEIVGTPDSIGQYESYQSFTMPDLYHVVNGIELFSPKFNVVPPGVNEEVYFPYYETERRLEGDRQRLEELLFTLEDPQQIFGYLENPEKRPLFSMARLDRIKNLTGLAEAFGRNKALQERCNLILVAGYLRTADSSDREEIAEIEKLYQIIDQYNLHGKIRWLGIRLPKADSGEIYRIIADRQGIFVQPALFEAFGLTILEAMISGLPTFGTQFGGPLEIIQDGVNGFYINPTHLEETAEKIVRFLEACDKDPQEWQRISQAAIERVYETYTWKIHTERLLTLAKIYGFWNFVSQENREDMLRYLEALFHLLYKPRAQALLAEHLQR

SEQ ID NO: 1208 - protein, 808 aa, Artificial Sequence
  engineered sucrose synthase encoded in plasmid pA34116
MTCVLLKAVVESDERADLRQFSRILQLGEKRYLLRNDILDAFADYCRDQERPVPPPSESRLSKLVFYTQEIIVDNESLCWIVRPRIAQQEVCRLHVEDLTIVPMTIPELLDLRDRLVNHYHPNEGDVFEIDVQPFYDYSPIIRDPKNIGKGVEFLNRYLSSKLFQDPRQWQQNLFNFLRIHRYNGYQLLINERIRSPQHLSEQVKQALVVLSDRPPTEAYSEFRFELQNLGFEPGWGNTVARVRDTLEILDQLLDSPDHQVLEAFLSRIPMLFRIALISPHGWFGQEGVLGRPDTGGQVVYILDQVKSLEKQMREDLELAGLEVLEAQPKIIVLTRLIPNAEGTRCNQRLEKIYGTNDAWILRVPFREFNPKVTQNWISRFEIWPYLETFAIDAERELRAEFGHVPDLIIGNYSDGNLVAFLLARRLKVTQCNIAHALEKSKYLFSNLYWQDLEDKYHFSLQFTADLIAMNAANFIISSTYQEIVGTPDSIGQYESYQSFTMPDLYHVVNGIELFSPKFNVVPPGVNEQVYFPYYHYTERLEGDRQRLEELLFTLEDPQQIYGYLENPEKRPLFSMARLDRIKNLTGLAEAFGRSKALQERCNLILVAGKLRTADSSDREEIAEIEKLYQIIHQYNLHGKIRWLGIRLPKADSGEIYRIIADRQGIFVQPALFEAFGLTILEAMISGLPTFGTRFGGPLEIIQDGVNGFYINPTHLEEMAETIVRFLEACDRDPQEWQRISKAGIERVYSTYTWKIHCTRLLSLAKIYGFWNFSSQENREDMMRYMEALFHLLYKPRAQALLAEHLQR

SEQ ID NO: 1209 - protein, 808 aa, Artificial Sequence
  engineered sucrose synthase encoded in plasmid pA34117
MTCVLLKAVVESDERADLRQFSRILQLGEKRYLLRNDILDAFADYCRDQERPVPPPSESRLSKLVFYTQEIIVDNESLCWIVRPRIAQQEVCRLHVEDLTIEPMTIPELLDLRDRLVNHYHPNEGDVFEIDVQPFYDYSPIIRDPKNIGKGVEFLNRYLSSKLFQDPRQWQQNLFNFLRIHRYNGQQLLINERIRSPQHLSEQVKQALKVLSDRPPTEAYSEFRFELQNLGFEPGWGNTVARVRDTLEILDQLLDSPDHQVLEAFLSRIPMLFRIALISPHGWFGQEGVLGRPDTGGQVVYILDQVKSLEKQMREDLELAGLDVLEAQPKIIVLTRLIPNAEGTRCNQRLEKIYGTNDAWILRVPFREFNPKVTQNWISRFEIWPYLETFAIDAERELRAEFGHVPDLIIGNYSDGNLVAFLLARRLKVTQCNIAHALEKSKYLFSNLYWQDLEDKYHFSLQFTADLIAMNAANFIISSTYQEIVGTPDSIGQYESYQSFTMPDLYHVVNGIELFSPKFNVVPPGVNEQVYFPYYHYTERLEGDRQRLEELLFTLEDPQQIYGYLENPEKRPLFSMARLDRIKNLTGLAEAFGRSKALQERCNLILVAGKLRTADSSDREEIAEIEKLYQIIHQYNLHGKIRWLGIRLPKADSGEIYRIIADRQGIFVQPALFEAFGLTILEAMISGLPTFGTRFGGPLEIIQDGVNGFYINPTHLEEMAETIVRFLEACDRDPQEWQRISKAGIERVYSTYTWKIHCTRLLSLAKIYGFWNFSSQENREDMMRYMEALFHLLYKPRAQALLAEHLQR

SEQ ID NO: 1210 - protein, 808 aa, Artificial Sequence
  engineered sucrose synthase encoded in plasmid pA34118
MTCVLLKAVVESDERADLRQFIRILQLGEKRYLLRNDILDAFADYCRDQERPVPPPSESRLSKLVFYTQEIIVDNESLCWIVRPRIAQQEVCRLHVEDLTIEPMTIPELLDLRDRLVNHYHPNEGDVFEIDVQPFYDYSPIIRDPKNIGKGVEFLNRYLSSKLFQDPRQWQQNLFNFLRIHRYNGQQLLINERIRSPQHLSEQVKQALKVLSDRPPDEAYSEFRFELQNLGFEPGWGNTVARVRDTLEILDQLLDSPDHQVLEAFLSRIPMLFRIALISPHGWFGQEGVLGRPDTGGQVVYILDQVKSLEKQMREDLELAGLDVLEAQPKIIVLTRLIPNAEGTRCNQRLEKIYGTENAWILRVPFREFNPKVTQNWISRFEIWPYLETFAIDAERELLAEFGHVPDLIIGNYSDGNLVAFLLARRLKVTQCNIAHALEKSKYLFSNLYWQDLEDKYHFSLQFTADLIAMNAANFIISSTYQEIVGTPDSIGQYESYQSFTMPDLYHVVNGIELFSPKFNVVPPGVNEQVYFPYYHYTERLEGDRQRLEELLFTLEDPQQIYGNLENPEKRPLFSMARLDRIKNLTGLAEAFGRSKALQERCNLILVAGKLRTADSSDREEIAEIEKLYQIIHQYNLHGKIRWLGIRLPKADSGEIYRIIADRQGIFVQPALFEAFGLTILEAMISGLPTFGTRFGGPLEIIQDGVNGFYINPTHLEEMAETIVRFLEACDKDPQEWQRISKAGIERVYSTYTWKIHCTRLLSLAKIYGFWNFSSQENREDMMRYMEALFHLLYKPRAQALLAEHLQR

SEQ ID NO: 1211 - protein, 808 aa, Artificial Sequence
  engineered sucrose synthase encoded in plasmid pA34119
MTCVLLKAVVESDERNDLRQFIRILQLSEKRYLLRNDILDAFADYCRDQERPVPPPSESRLSKLVYYTQEIIVDNESLCWIVRPRIAQQEVCRLHVEDLTIEPMTIPELLDLRDRLVNHYHPNEGDVFEIDVQPFYDYSPKIRDPKNIGKGVEFLNRYLSSKLFQDPRQWQENLFDFLRIHRYNGQQLLINERIRSPQHLSEQVKQALKVLSDRPPDEAYEEFRFELQNLGFEPGWGRTVARVRDTLEILDQLLDSPDHQVLEAFLSRIPMIFRIALISPHGWFGQEGVLGRPDTGGQVVYILDQVRSLEKQMREDLELAGLDVLEAQPKIIVLTRLIPNAEGTTCNQRLEKIYGTENAWILRVPFREFNPKVTQNWISRFEIWPYLETFAIDAERELLAEFGGVPDLIIGNYSDGNLVAFLLARRLKVTQCNIAHALEKSKYLFSNLYWQDLEDKYHFSLQFTADLIAMNAADFIISSTYQEIVGTPDSIGQYESYQSFTMPDLYHVVNGIELFHPKFNVVPPGVNEQVYFPYYHKTERLEGDRQRLEELLFTLEDPQQIYGNLENPEKRPLFSMARLDRIKNLTGLAEAFGRSKALQERCNLILVAGKLRTADSSDREEIAEIEKLYQIIDQYNLHGKIRWLGIRLPKADSGEIYRIIADRQGIFVQPALFEAFGLTILEAMISGLPTFATQFGGPLEIIQDGVNGFYINPTHLEEMAETIVRFLEACDKDPQEWQRISQAAIERVYSTYTWKIHTTRLLSLAKIYGFWNFTSQENREDMMRYLEALFHLLYKPRAQALLAEHLQR

SEQ ID NO: 1212 - protein, 808 aa, Artificial Sequence
  engineered sucrose synthase encoded in plasmid pA34120
MTCVLLKAVVESDHRNDLRQFIRILQASEKRYLLRNDILDAFADYCRDQERPVPPPSESRLSKLVYYTQEIIVDNESLCWIVRPRIAQQEVCRLHVEDLTFEPMTIPELLDFRDRLVNHYHPNEGDVFEIDVQPFYDYSPKIRDPKNIGKGVEFLNRYLSSKLFQDPRQWQENLFDFLRIHRYNGQQLLINERIRSPQHLSEQVKQALKYLSDRPPDEPYEEFRFELQNLGFEPGWGNTVARVRETLEILAQLLDSPDHQVLEAFLSRIPMIFRIALISPHGWFGQEGVLGRPDTGGQVVYILDQVRALERQMREDLQLAGLDWLEAQPKIIVLTRLIPNAEGTTCNQRLEKIYGTENAWILRVPFREFNPKVTQNWISRFEIWPYLETFAIDAERELLAEFGGVPDLIIGNYSDGNLVAFLLARRLKVTQCNIAHALEKSKYLFSNLYWQDLEDKYHFSLQFTADLIAMNAADFIISSTYQEIVGTPDSIGQYESYQSFTMPDLYHVVNGIELFHPKFNVVPPGVNEQVYFPYYHKTERLEGDRQRLEELLFTLEDPQQIFGNLSNPEKRPLFSMARLDRIKNLTGLAEAFGRSKALQERCNLILVAGKLRTADSSDREEIAEIEKLYQIIDQYNLHGKIRWLGIRLPKADSGEIYRIIADRQGIFVQPALFEAFGLTILEAMISGLPTFATQFGGPLEIIQDGVNGFYINPTHLEEMAEKIVRFLEACDKDPQEWQRISQAAIERVYETYTWKIHTERLLSLAKIYGFWNFTSQENREDMMRYLEALFHLLYKPRAQALLAEHLQR

SEQ ID NO: 1213 - protein, 808 aa, Artificial Sequence
  engineered sucrose synthase encoded in plasmid pA34121
MTCVLLKAVVESDERADLRQFLRILQLGEKRYLLRNDILDAFADYCRDQERPVPPPSSSRLSKLVFYTQEIIVDNESLCWIVRPRIAQQEVCRLLVEDLTIEPMTIPELLDLRDRLVNHYHPNEGDVFEIDVQPFYDYSPIIRDAKNIGKGVEFLNRYLSSKLFQDPRQWQQNLFNFLRIHRYNGYQLLINERIRSPQHLSEQVKQALVVLSDRPPTEAYSEFRFELQNLGFEPGWGNTVARVRETLELLDQLLDSPDHQVLEAFLSRIPMLFRIALISPHGWFGQEGVLGRPDTGGQVVYILDQVKSLEKQMREDLELAGLGVLEAQPKIIVLTRLIPNAEGTLCNQRLEKIYGTNDAWILRVPFREFNPKVTQNWISRFEIWPYLETFAIDAERELRAEFGGVPDLIIGNYSDGNLVAFLLARRLKVTQCNIAHALEKSKYLFSNLYWQDLEDKYHFSLQFTADLIAMNAANFIISSTYQEIVGTPDSIGQYESYQSFTMPDLYHVVNGIELFSPKFNVVPPGANEQVYFPYTHYTRRLEGDRQRLEELLFTLEDPQQIYGYLENPEKRPLFSMARLDRIKNLTGLAEAFGRSKALQERCNLILVAGKLRTADSSDREEIAEIEKLYQIIHQYNLHGKIRWLGIRLPKADSGEIYRIIADRQGIFVQPALFEAFGLTILEAMISGLPTFGTRFGGPLEIIQDGVNGFYINPTHLEEMAEKIVRFLEHCDRDPQEWQRISKAGIERVYSTYTWKIHCTRLLSLAKIYGFWNFSSQENREDMMRYMEALFHLLYKPRAQALLAEHLQR

SEQ ID NO: 1214 - protein, 808 aa, Artificial Sequence
  engineered sucrose synthase encoded in plasmid pA34122
MTCVLLKAVVESDERADLRQFLRILQLGEKRYLLRNDILDAFADYCRDQERPVPPPSSSRLSKLVFYTQEIIVDNESLCWIVRPRIAQQEVCRLLVEDLTIEPMTIPELLDLRDRLVNHYHPNEGDVFEIDMQPFYDYSPIIRDAKNIGKGVEFLNRYLSSKLFQDPRQWQQNLFNFLRIHRYNGYQLLINERIRSPQHLSEQVKQALKVLSDRPPDEAYSEFRFELQNLGFEPGWGNTVARVRETLELLDQLLDSPDHQVLEAFLSRIPMLFRIALISPHGWFGQEGVLGRPDTGGQVVYILDQVKSLEKQMREDLELAGLGVLEAQPKIIVLTRLIPNAEGTLCNQRLEKIYGTNDAWILRVPFREFNPKVTQNWISRFEIWPYLETFAIDAERELRAEFGGVPDLIIGNYSDGNLVAFLLARRLKVTQCNIAHALEKSKYLFSNLYWQDLEDKYHFSLQFTADLIAMNAANFIISSTYQEIVGTPDSIGQYESYQSFTMPDLYHVVNGIELFSPKFNVVPPGANEQVYFPYTHYTRRLEGDRQRLEELLFTLEDPQQIYGYLENPEKRPLFSMARLDRIKNLTGLAEAFGRSKALQERCNLILVAGKLRTADSSDREEIAEIEKLYQIIHQYNLHGKIRWLGIRLPKADSGEIYRIIADRQGIFVQPALFEAFGLTILEAMISGLPTFGTRFGGPLEIIQDGVNGFYINPTHLEEMAEKIVRFLEHCDRDPQEWQRISKAGIERVYSTYTWKIHCTRLLSLAKIYGFWNFSSQENREDMMRYMEALFHLLYKPRAQALLAEHLQR

SEQ ID NO: 1215 - protein, 808 aa, Artificial Sequence
  engineered sucrose synthase encoded in plasmid pA34123
MTCVLLKAVVESDERADLRQFLRILQLSEKRYLLRNDILDAFADYCRDQEKPEPPPSSSRLSKLVHYTQEIIVDNESLCWIVRPRIAQQEVCRLHVEDLTIEPMTIPELLDLRDRLVNHYHPNEGDVFEIDMQPFYDYFPIIRDPKNIGKGVEFLNRYLSSKLFQDPRQWQENLFNFLRVHRYNGQQLLINERIRSPQHLSEQVKQALKVLSDRPPDEAYSEFRFELQNLGFEPGWGNTVARVRETLELLAQLLDSPDHQVLEAFLSRIPMIFRIALISPHGWFGQEGVLGRPDTGGQVVYILDQVKSLEKQMREDLELAGLGVLEAQPKIIVLTRLIPNAEGTRCNQRLEKIYGTNDAWILRVPFREFNPKVTQNWISRFEIWPYLETFAIDAERELRAEFGGVPDLIIGNYSDGNLVAFLLARRLKVTQCNIAHALEKSKYLFSNLYWQDLEDKYHFSLQFTADLIAMNAANFIISSTYQEIVGTPDSIGQYESYQSFTMPDLYRVVNGIELFSPKFNVVPPGANEQVYFPYTHYTRRLEGDRQRLEELLFTLEDPQQIYGYLENPEKRPLFSMARLDRIKNLTGLAEAFGKSKALQERCNLILVAGKLRTADSSDREEIAEIEKLHQIIKQYNLHGKIRWLGIRLPKADSGEIYRIIADRQGIFVQPALFEAFGLTILEAMISGLPTFGTRFGGPLEIIQDGVNGFYINPTHLEEMAKKIVRFLEQCDRDPQHWQRISKAGIERVYSKYTWKIHCTRLLSLAKIYGFWNFVSQENREDMMRYMEALFHLLYKPRAQALLAEHLQR

SEQ ID NO: 1216 - protein, 808 aa, Artificial Sequence
  engineered sucrose synthase encoded in plasmid pA34124
MTCVLLKAVVESDERNDLRQFLRILQLSGKRYLLRNDILDAFADYCRDQEKPEPPPSSSRLSKLVHYTQEIIVDNESLCWIVRPRIAQQEVCRLHVEDLTIEPMTIPELLDLRDRLVNHYHPNEGDVFEIDMQPFYDYFPIIRDPKNIGKGVEFLNRYLSSKLFQDPRQWQENLFNFLRVHRYNGQQLLINERIRSPQHLSEQVKQALKVLSDRPPDEAYSEFRFELQNLGFEPGWGNTVARVRETLELLAQLLDSPDHQVLEAFLSRIPMIFRIVLVSPHGWFGQEGVLGRPDTGGQVVYILDQVKSLEKQMREDLELAGLGVLEAQPKIIVLTRLIPNAEGTRCNQRLEKIYGTNNAWILRVPFREFNPKVTQNWISRFEIWPYLETFAIDAERELRAEFGGVPDLIIGNYSDGNLVAFLLARRLKVTQCNIAHALEKSKYLFSNLYWQDLEDKYHFSLQFTADLIAMNAADFIISSTYQEIVGTPDSIGQYESYQSFTMPDLYRVVNGIELFSPKFNVVPPGANEQVYFPYTHKTRRLEGDRQRLEELLFTLEDPQQIYGYLENPEKRPLFSMARLDRIKNLTGLAEAFGKSKKLQERCNLILVAGKLRTADSSDREEIAEIEKLHQIIKQYNLHGKIRWLGIRLPKADSGEIYRIIADRQGIFVQPALFEAFGLTILEAMISGLPTFGTRFGGPLEIIQHGVNGFYINPTHLEEMAEKIVRFLEQCDRDPQHWQRISKAGIERVYSKYTWKIHTERLLSLAKIYGFWNFVSQENREDMMRYLEALFHLLYKPRAQALLAEHLQR

SEQ ID NO: 1217 - protein, 808 aa, Artificial Sequence
  engineered sucrose synthase encoded in plasmid pA34125
MTCVLLKAVLESDERNDLHQFLRILQASGKRYLLRNDILDAFADYCRDQEKPEPPPHSSRLSKLVHYTQEIIVDNESLCWIVRPRIAQQEVCRLHVEDLTIEPMTIPELLDLRDRLVNHYHPNEGDVFEIDMQPFYDYFPKIRDPKNIGRGVEFLNRYLSSKLFQDPRQWQENLFDFLRVHRYNGQQLLINERIRSPQHLSEQVKQALKVLSDRPPDEPYSEFRFELQELGFEPGWGNTVARVRETLELLAQLLDSPDHQVLEAFLSRIPMIFRIVLVSPHGWFGQEGVLGRPDTGGQVVYILDQVRALEKQMREDLELAGLGVLEAQPKIIVLTRLIPNAEGTRCNQRLEKIYGTENAWILRVPFREFNPKVTQNWISRFEIWPYLETFAIDAERELRAELGGVPDLIIGNYSDGNLVAFLLARRLKVTQCNIAHALEKSKYLFSNLYWQDLEDKYHFSLQFTADLIAMNAADFIISSTYQEIVGTPDSIGQYESYQSFTMPDLYRVVNGIELFSPKFNVVPPGANEQVYFPYTHKTRRLEGDRQRLEELLFTLEDPQQIYGYLENPEKRPLFSMARLDRIKNLTGLAEAFGKSQKLQERCNLILVAGKLRTADSSDREEIAEIEKLHQIIDQYNLHGKIRWLGIRLPKADSGEIYRIIADRQGIFVQPALFEAFGLTILEAMISGLPTFGTRFGGPLEIIQDGVNGFHINPTHLEEMAEKIVRFLEQCDRDPQHWQRISQAAIERVREKYTWKIHTERLLTLAKIYGFWNFVSQENREDMMRYLEALFHLLYKPRAQALLAEHLQR

SEQ ID NO: 1218 - protein, 808 aa, Artificial Sequence
  engineered sucrose synthase encoded in plasmid pA34126
MTCVLLKAVVESDERADLRQFIRILQLQEKRYLLRNDILDAFADYCRDQERPVPPPSESRLSKLVRYTQEIIVDNESLCWIVRPRIAQQEVCRLHVEDLTIEPMTIPELLDLRDRLVNHYHPNEGDVFEIDVQPFYDYSPIIRDPKNIGKGVEFLNRYLSSKLFQDPRQWQQNLFNFLRIHRYNGYQLLINERIRSPQHLSEQVKQALVVLSDRPPTEAYSEFRFELQNLGFEPGWGNTVARVRDTLEILDQLLDSPDHQVLEAFLSRIPMLFRIALISPHGWFGQEGVLGRPDTGGQVVYILDQVKSLEKQMREDLELAGLGVLEAQPKIIVLTRLIPNAEGTLCNQRLEKIYGTNDAWILRVPFREFNPKVTQNWISRFEIWPYLETFAIDAERELRAEFGHVPDLIIGNYSDGNLVAFLLARRLKVTQCNIAHALEKSKYLFSNLYWQDLEDKYHFSLQFTADLIAMNAANFIISSTYQEIVGTPDSIGQYESYQSFTMPDLYHVVNGIELFSPKFNVVPPGVNEQVYFPYYHYTERLEGDRQRLEELLFTLEDPQQIYGYLENPEKRPLFSMARLDRIKNLTGLAEAFGRSKALQERCNLILVAGKLRTADSSDREEIAEIEKLYQIIHQYNLHGKIRWLGIRLPKADSGEIYRIIADRQGIFVQPALFEAFGLTILEAMISGLPTFGTRFGGPLEIIQDGVNGFYINPTHLEEMAEKIVRFLEACDRDPQEWQRISKAGIERVYSTYTWKIHCTRLLSLAKIYGFWNFVSQENREDMMRYMEALFHLLYKPRAQALLAEHLQR

SEQ ID NO: 1219 - protein, 808 aa, Artificial Sequence
  engineered sucrose synthase encoded in plasmid pA34127
MTCVLLKAVVESDERADLRQFIRILQLQEKRYLLRNDILDAFADYCRDQERPVPPPSESRLSKLVRYTQEIIVDNESLCWIVRPRIAQQEVCRLHVEDLTFEPMTIPELLDLRDRLVNHYHPNEGDVFEIDVQPFYDYSPIIRDPKNIGKGVEFLNRYLSSKLFQDPRQWQQNLFNFLRIHRYNGQQLLINERIRSPQHLSEQVKQALKVLSDRPPDEAYSEFRFELQNLGFEPGWGNTVARVRDTLEILDQLLDSPDHQVLEAFLSRIPMLFRIALISPHGWFGQEGVLGRPDTGGQVVYILDQVKSLEKQMREDLELAGLGVLEAQPKIIVLTRLIPNAEGTLCNQRLEKIYGTNDAWILRVPFREFNPKVTQNWISRFEIWPYLETFAIDAERELRAEFGHVPDLIIGNYSDGNLVAFLLARRLKVTQCNIAHALEKSKYLFSNLYWQDLEDKYHFSLQFTADLIAMNAANFIISSTYQEIVGTPDSIGQYESYQSFTMPDLYHVVNGIELFHPKFNVVPPGVNEQVYFPYYHYTERLEGDRQRLEELLFTLEDPQQIYGNLEDPEKRPLFSMARLDRIKNLTGLAEAFGRSKALQERCNLILVAGKLRTADSSDREEIAEIEKLYQIIHQYNLHGKIRWLGIRLPKADSGEIYRIIADRQGIFVQPALFEAFGLTILEAMISGLPTFGTRFGGPLEIIQDGVNGFYINPTHLEEMAEKIVRFLEACDRDPQEWQRISKAGIERVYSTYTWKIHCTRLLSLAKIYGFWNFVSQENREDMMRYMEALFHLLYKPRAQALLAEHLQR

SEQ ID NO: 1220 - protein, 808 aa, Artificial Sequence
  engineered sucrose synthase encoded in plasmid pA34128
MTCVLLKAVVESDERADLRQFIRILQLQEKRYLLRNDILDAFADYCRDQERPVPPPHESRLSKLVRYTQEIIVDNESLCWIVRPRIAQQEVCRLHVEDLTFEPMTIPELLDLRDRLVNHYHPNEGDVFEIDVQPFYDYSPIIRDPKNIGKGVEFLNRYLSSKLFQDPRQWQQNLFNFLRIHRYNGQQLLINERIRSPQHLSEQVKQALKYLSDRPPDEAYSEFRFELQNLGFEPGWGNTVARVRDTLEILLQLLDSPDHQVLEAFLSRIPMIFRIALISPHGWFGQEGVLGRPDTGGQVVYILDQVKSLEKQMREDLELAGLGVLEAQPKIIVLTRLIPNAEGTLCNQRLEKIYGTNDAWILRVPFREFNPKVTQNWISRFEIWPYLETFAIDAERELRAEFGHVPDLIIGNYSDGNLVAFLLARRLKVTQCNIAHALEKSKYLFSNLYWQDLEDKYHFSLQFTADLIAMNAANFIISSTYQEIVGTPDSIGQYESYQSFTMPDLYHVVNGIELFHPKFNVVPPGVNEQVYFPYYHYTERLEGDRQRLEELLFTLEDPQQIYGNLENPEKRPLFSMARLDRIKNLTGLAEAFGRSKALQERCNLILVAGKLRTADSSDREEIAEIEKLYQIIHQYNLHGKIRWLGIRLPKADSGEIYRIIADRQGIFVQPALFEAFGLTILEAMISGLPTFGTRFGGPLEIIQDGVNGFYINPTHLEEMAEKIVRFLERCDRDPQEWQRISKAGIERVYSTYTWKIHCTRLLSLAKIYGFWNFVSQENREDMMRYMEALFHLLYKPRAQALLAEHLQR

SEQ ID NO: 1221 - protein, 808 aa, Artificial Sequence
  engineered sucrose synthase encoded in plasmid pA34129
MTCVLLKAVVESDERNDLRQFIRYLQAQEKRYLLRNDILDAFADYCRDQERPVPPPHESRLWKLVRYTQEIIVDNESLCWIVRPRIAQQEVCRLHVEDLTFEPMTIPELLDLRDRLVNHYHPNEGDVFEIDVQPFYDYSPIIRDPKNIGKGVEFLNRYLSSKLFQDPRQWQENLFNFLRIHRYNGQQLLINERIRSPQQLSEQVKQALKYLSDRPPDEAYSEFRFELQNLGFEPGWGNTVARVRDTLEILLQLLDSPDHQVLEAFVSRIPMIFRIALISPHGWFGQEGVLGRPDTGGQVVYILDQVKSLEKQMREDLELAGLGVLEAQPKIIVLTRLIPNAEGTTCNQRLEKIYGTEDAWILRVPFREFNPKVTQNWISRFEIWPYLETFAIDAERELRAEFGHVPDLIIGNYSDGNLVAFLLARRLKVTQCNIAHALEKSKYLFSNLYWQDLEDKYHFSLQFTADLIAMNAADFIISSTYQEIVGTPDSIGQYESYQSFTMPDLYHVVNGIELFHPKFNVVPPGVNEQVYFPYYHKTKRLEGDRQRLEELLFTLEDPQEIYGNLENPEKRPLFSMARLDRIKNLTGLAEAFGRSKALQERCNLILVAGKLRTADSSDREEIAEIEKLYQIIHQYNLHGKIRWLGIRLPKADSGEIYRIIADRQGIFVQPALFEAFGLTILEAMISGLPTFGTRFGGPLEIIQDGVNGFYINPTHLEEMAEKIVRFLERCDRDPQEWQRISQAGIERVYSTYTWKIHTERLLSLAKIYGFWNFMSQENREDMMRYMEALFHLLYKPRAQALLAEHLQR

SEQ ID NO: 1222 - protein, 808 aa, Artificial Sequence
  engineered sucrose synthase encoded in plasmid pA34130
MTCVLLKAVWESDERNALRQFIRILQAQGKRYLLRNDILDAFADYCHDQERPVPPYHNSRLWKLVRYTQEIIIDNESLCWIVRPRIAQQEVCRLHVEDLTVEPMTIPELLDLRDRLVNRYHPNEGDVFEIDVQPFYDYSPKIRDPKNIGKGVEFLNRYLSSKLFQDPRQGQENLFNFLRIHRYNGQQLLINERIRNPQQLSEQVKQALKYLSDRPPDEAYSEFRFELQELGFEPGWGNTVARVRETLEILLQLLDSPDHQVLEAFLSRIPMIFRIAIISPHGWFGQEGVLGRPDTGGQVVYILDQVKSLEKQMREDLELAGLGVLEAQPKIIVLTRLIPNAEGTRCNQRLEKIYGTEDAWILRVPFREFNPKVTQNWISRFEIWPYLETFAIDAERELRAEFGHVPDLIIGNYSDGNLVAFLLARRLKVTQCNIAHALEKSKYLFSDLYWQDLEDKYHFSLQFTADLIAMNAADFIISSTYQEIVGTPDSIGQYESYQSFTMPDLYHVVNGIELFHPKFNVVPPGVNEQVYFPYYHKTKRLEGDRQRLEELLFTLEDPQEIYGNLENPEKRPLFSMARLDRIKNLTGLAEAFGRSKALQERCNLILVAGKLRTADSSDREEIAEIEKLYQIIEQYNLHGKIRWLGIRLPKADSGEIYRIIADRQGIFVQPALFEAFGLTILEAMISGLPTFGTQFGGPLEIIQHGVNGFYINPTHLEEMAEKIVRFLERCDRDPQEWQRISQAAIERVYEKYTWKIHAERLLSLAKIYGFWNFVSQENREDMMRYLEALYHLLYKPRAQALLAEHLQR

SEQ ID NO: 1223 - protein, 808 aa, Artificial Sequence
  engineered sucrose synthase encoded in plasmid pA34131
MTCVLLKAVVESDERADLRQFSRILQLGEKRYLLRNDILDAFADYCRDQERPVPPPSESRLSKLVFYTQEIIVDNESLCWIVRPRIAQQEVCRLHVEDLTIEPMTIPELLDLRDRLVNHYHPNEGDVFEIDVQPFYDYSPIIRDAKNIGKGVEFLNRYLSSKLFQDPRQWQQNLFNFLRIHRYNGQQLLINERIRSPQHLSEQVKQALVVLSDRPPTEAYSEFRFELQNLGFEPGWGNTVARVRDTLEILDQLLDSPDHQVLEAFVSRIPMIFRIALISPHGWFGQEGVLGRPDTGGQVVYILDQVKSLEKQMREDLELAGLGVLEAQPKIIVLTRLIPNAEGTLCNQRLEKIYGTNDAWILRVPFREFNPKVTQNWISRFEIWPYLETFAIDAERELRAEFGHVPDLIIGNYSDGNLVAFLLARRLKVTQCNIAHALEKSKYLFSNLYWQDLEDKYHFSLQFTADLIAMNAANFIISSTYQEIVGTPDSIGQYESYQSFTMPDLYHVVNGIELFSPKFNVVPPGVNEQVYFPYYHYTERLEGDRQRLEELLFTLEDPQQIYGYLENPEKRPLFSMARLDRIKNLTGLAEAFGRSKALQERCNLILVAGKLRTADSSDREEKAEIEKLYQIIHQYNLHGKIRWLGIRLPKADSGEIYRIIADRQGIFVQPALFEAFGLTILEAMISGLPTFGTRFGGPLEIIQDGVNGFYINPTHLEEMAETIVRFLEHCDRDPQEWQRISKAGIERVYSTYTWKIHCTRLLSLAKIYGFWNFSSQENREDMMRYMEALFHLLYKPRAQALLAEHLQR

SEQ ID NO: 1224 - protein, 808 aa, Artificial Sequence
  engineered sucrose synthase encoded in plasmid pA34132
MTCVLLKAVVESDERADLRQFSRILQLGEKRYLLRNDILDAFADYCRDQERPVPPPSESRLSKLVFYTQEIIVDNESLCWIVRPRIAQQEVCRLHVEDLTIEPMTIPELLDLRDRLVNHYHPNEGDVFEIDVQPFYDYSPIIRDPKNIGKGVEFLNRYLSSKLFQDPRQWQQNLFNFLRIHRYNGQQLLINERIRSPQHLSEQVKQALKVLSDRPPTEAYSEFRFELQNLGFEPGWGNTVARVRDTLEILDQLLDSPDHQVLEAFVSRIPMIFRIALISPHGWFGQEGVLGRPDTGGQVVYILDQVKSLEKQMREDLELAGLGVLEAQPKIIVLTRLIPNAEGTLCNQRLEKIYGTNDAWILRVPFREFNPKVTQNWISRFEIWPYLETFAIDAERELRAEFGHVPDLIIGNYSDGNLVAFLLARRLKVTQCNIAHALEKSKYLFSNLYWQDLEDKYHFSLQFTADLIAMNAANFIISSTYQEIVGTPDSIGQYESYQSFTMPDLYHVVNGIELFSPKFNVVPPGVNEQVYFPYTHYTERLEGDRQRLEELLFTLEDPQQIYGYLENPEKRPLFSMARLDRIKNLTGLAEAFGRSKALQERCNLILVAGKLRTADSSDREEKAEIEKLYQIIHQYNLHGKIRWLGIRLPKADSGEIYRIIADRQGIFVQPALFEAFGLTILEAMISGLPTFGTRFGGPLEIIQDGVNGFYINPTHLEEMAETIVRFLEQCDRDPQEWQRISKAGIERVYSTYTWKIHCTRLLSLAKIYGFWNFSSQENREDMMRYMEALFHLLYKPRAQALLAEHLQR

SEQ ID NO: 1225 - protein, 808 aa, Artificial Sequence
  engineered sucrose synthase encoded in plasmid pA34133
MTCVLLKAVVESDERADLRQFSRILQLGEKRYLLRNDILDAFADYCRDQERPVPPPHESRLWKLVHYTQEIIVDNEWLCWIVRPRIAQQEVCRLHVEDLTIEPMTIPELLDLRDRLVNHYHPNEGDVFEIDVQPFYDYSPIIRDPKNIGKGVEFLNRYLSSKLFQDPRQWQQNLFNFLRIHRYNGQQLLINERIRSPQHLSEQVKQALKVLSDRPPDEAYSEFRFELQNLGFEPGWGNTVARVRDTLEILDQLLDSPDHQVLEAFVSRIPMIFRIALISPHGWFGQEGVLGRPDTGGQVVYILDQVKSLEKQMREDLELAGLGVLEAQPKIIVLTRLIPNAEGTRCNQRLEKIYGTNDAWILRVPFREFNPKVTQNWISRFEIWPYLETFAIDAERELRAEFGHVPDLIIGNYSDGNLVAFLLARRLKVTQCNIAHALEKSKYLFSNLYWQDLEDKYHFSLQFTADLIAMNAANFIISSTYQEIVGTPDSIGQYESYQSFTMPDLYHVVNGIELFSPKFNVVPPGVNEQVYFPYTETTRRLEGDRQRLEELLFTLEDPQQIYGYLENPEKRPLFSMARLDRIKNLTGLAEAFGRSKALQERCNLILVAGKLRTADSSDREEKAEIEKLYQIIDQYNLHGKIRWLGIRLPKADSGEIYRIIADRQGIFVQPALFEAFGLTILEAMISGLPTFATRFGGPLEIIQDGVNGFYINPTHLEEMAETIVRFLEHCDRDPQEWQRISKAGIERVYSTYTWKIHTTRLLSLAKIYGFWNFSSQENREDMMRYMEALFHLLYKPRAQALLAEHLQR

SEQ ID NO: 1226 - protein, 808 aa, Artificial Sequence
  engineered sucrose synthase encoded in plasmid pA34134
MTCVLLKAVVESDERADLRQFSRILQASEKRYLLRNDILDAFADYCRDQERPVPPPHESRLWKLVRYTQEIIVDNEWLCWIVRPRIAQQEVCRLHVEDLTIEPMTIPELLDLRDRLVNHYHPNEGDVFEIDMQPFYDYFPIIRDPKNIGKGVEFLNRYLSSKLFQDPRQWQQNLFNFLRIHRYNGQQLLINERIRSPQHLSEQVKQALKVLSDRPPDEAYSEFRFELQNLGFEPGWGNTVARVRDTLEILDQLLDSPDHQVLEAFVSRIPMIFRIALISPHGWFGQEGVLGRPDTGGQVVYILDQVKSLEKQMREDLELAGLGVLEAQPKIIVLTRLIPNAEGTRCNQRLEKIYGTNDAWILRVPFREFNPKVTQNWISRFEIWPYLETFAIDAERELRAEFGHVPDLIIGNYSDGNLVAFLLARRLKVTQCNIAHALEKSKYLFSNLYWQDLEDKYHFSLQFTADLIAMNAADFIISSTYQEIVGTPDSIGQYESYQSFTMPDLYHVVNGIELFHPKFNVVPPGVNEQVYFPYYRTERRLEGDRQRLEELLFTLEDPQQIYGYLENPEKRPLFSMARLDRIKNLTGLAEAFGRSKALQERCNLILVAGKLRTADSSDREEKAEIEKLYQIIDQYNLHGKIRWLGIRLPKADSGEIYRIIADRQGIFVQPALFEAFGLTILEAMISGLPTFATRFGGPLEIIQDGVNGFYINPTHLEEMAETIVRFLEQCDRDPQHWQRISQAGIERVYSTYTWKIHTTRLLSLAKIYGFWNFVSQENREDMMRYMEALFHLLYKPRAQALLAEHLQR

SEQ ID NO: 1227 - protein, 808 aa, Artificial Sequence
  engineered sucrose synthase encoded in plasmid pA34135
MTCVLLKAVWESDERADLRQFSRILRDSGKRYLLRNDILDAFADYCRDQERPEPPPHESRLWKLVRYTQEIIVDNEWLCWIVRPRIAQQEVCRLHVEDLTIEPMTIPELLDLRDRLVNHYHPNEGDVFEIDMQPFYDYFPKIRDPKNIGKGVEFLNRYLSSKLFQDPRQWQQNLFNFLRIHRYNGQQLLINERIRSPQHLSEQVKQALKVLSDRPPDEAYSEFRFELQNLGFEPGWGNTVARVRDTLELLAQLLDSPDHQVLEAFLSRIPMIFRIALISPHGWFGQEGVLGRPDTGGQVVYILDQVRSLEKQMREDLELAGLGVLEAQPKIIVLTRLIPNAEGTRCNQRLEKIYGTDDAWILRVPFREFNPKVTQNWISRFEIWPYLETFAIDAERELLAEFGHVPDLIIGNYSDGNLVAFLLARRLKVTQCNIAHALEKSKYLFSNLYWQDLEDKYHFSLQFTADLIAMNAADFIISSTYQEIVGTPDSIGQYESYQSFTMPDLYHVVNGIELFHPKFNVVPPGVNEQVYFPYYETERRLEGDRQRLEELLFTLEDPQQIYGYLENPEKRPLFSMARLDRIKNLTGLAEAFGRSKALQERCNLILVAGKLRTADSSDREEKAEIEKLYQIIDQYNLHGKIRWLGIRLPKADSGEIYRIIADRQGIFVQPALFEAFGLTILEAMISGLPTFATRFGGPLEIIQHGVNGFYINPTHLEEMAEKIVRFLEQCDRDPQHWQRISQAAIERVYETYTWKIHAKRLLSLAKIYGFWNFVSQENREDMMRYMEALFHLLYKPRAQALLAEHLQR

SEQ ID NO: 1228 - protein, 440 aa, Artificial Sequence
  engineered beta-1,2-glycosyltransferase
  SITE (1)..(1): Xaa is Arg or Asp or Gln or Pro or Ser or Thr
  SITE (2)..(2): Xaa is Asn or Leu or Ser or Thr
  SITE (3)..(3): Xaa is Gln or Leu or Phe
  SITE (4)..(4): Xaa is Arg or Gln or Thr
  SITE (6)..(6): Xaa is Alala or Leu or Thr or Val
  SITE (8)..(8): Xaa is Leu or Phe or Val
  SITE (12)..(12): Xaa is Ala or Gly
  SITE (16)..(16): Xaa is Ile or Val
  SITE (19)..(19): Xaa is Phe or Tyr
  SITE (22)..(22): Xaa is Ile or Leu or Val
  SITE (24)..(24): Xaa is Arg or Lys
  SITE (25)..(25): Xaa is Gln or Lys
  SITE (26)..(26): Xaa is Leu or Met
  SITE (28)..(28): Xaa is Asp or Lys
  SITE (30)..(30): Xaa is Asn or Gly
  SITE (31)..(31): Xaa is Met or Phe
  SITE (32)..(32): Xaa is His or Ile or Leu or Ser or Tyr or Val
  SITE (33)..(33): Xaa is Ile or Val
  SITE (34)..(34): Xaa is His or Tyr
  SITE (35)..(35): Xaa is Leu or Met or Val
  SITE (36)..(36): Xaa is Ala or Cys or Leu or Val
  SITE (37)..(37): Xaa is Asn or Ser
  SITE (39)..(39): Xaa is Ala or Lys or Met or Pro
  SITE (40)..(40): Xaa is Ile or Val
  SITE (41)..(41): Xaa is Asn or Gln or Val
  SITE (43)..(43): Xaa is Asn or Glu or Lys or Ser
  SITE (44)..(44): Xaa is Leu or Met or Ser
  SITE (45)..(45): Xaa is Ala or Ile or Leu or Thr
  SITE (46)..(46): Xaa is Arg or Lys
  SITE (47)..(47): Xaa is Gly or His or Lys
  SITE (50)..(50): Xaa is Pro or Thr
  SITE (51)..(51): Xaa is Asn or Glu or Lys or Tyr
  SITE (52)..(52): Xaa is Ala or Lys
  SITE (54)..(54): Xaa is Ala or Gln or Leu or Ser or Val
  SITE (55)..(55): Xaa is Asn or Asp or Gln or Glu or Leu or Ser
  SITE (56)..(56): Xaa is Leu or Ser
  SITE (58)..(58): Xaa is Gln or Glu or His or Ile
  SITE (60)..(60): Xaa is Ile or Val
  SITE (61)..(61): Xaa is Glu or Thr
  SITE (62)..(62): Xaa is Leu or Ser or Tyr or Val
  SITE (63)..(63): Xaa is Ala or Arg or Gln or His or Ser
  SITE (66)..(66): Xaa is Gln or Glu or Leu
  SITE (72)..(72): Xaa is Pro or Ser
  SITE (73)..(73): Xaa is His or Tyr
  SITE (74)..(74): Xaa is Leu or Tyr
  SITE (75)..(75): Xaa is His or Trp
  SITE (79)..(79): Xaa is Ala or Gly
  SITE (86)..(86): Xaa is Gly or Lys
  SITE (87)..(87): Xaa is Arg or Ile or Leu or Thr or Val
  SITE (89)..(89): Xaa is Arg or Gln or His or Ile or Lys
  SITE (90)..(90): Xaa is Arg or Gln or Lys
  SITE (91)..(91): Xaa is Ala or Leu
  SITE (92)..(92): Xaa is Leu or Val
  SITE (93)..(93): Xaa is Arg or Gln or Lys
  SITE (94)..(94): Xaa is Leu or Met
  SITE (95)..(95): Xaa is Ala or Ser
  SITE (96)..(96): Xaa is Ala or Arg or Gln
  SITE (98)..(98): Xaa is Asn or Glu or Thr
  SITE (99)..(99): Xaa is Ile or Leu or Phe or Val
  SITE (102)..(102): Xaa is Gln or Ile or Leu or Thr or Val
  SITE (103)..(103): Xaa is Ile or Leu or Val
  SITE (104)..(104): Xaa is Arg or Gln or Glu or Lys or Ser
  SITE (105)..(105): Xaa is Ala or Asn or Asp or Thr
  SITE (106)..(106): Xaa is Ile or Leu or Trp
  SITE (107)..(107): Xaa is Asn or Lys
  SITE (108)..(108): Xaa is Ala or Pro or Ser or Val
  SITE (109)..(109): Xaa is Ala or Asp or Ser or Thr
  SITE (111)..(111): Xaa is Ile or Leu or Val
  SITE (112)..(112): Xaa is Ile or Leu or Val
  SITE (113)..(113): Xaa is Leu or Phe or Tyr or Val
  SITE (115)..(115): Xaa is Ile or Leu or Met or Phe
  SITE (117)..(117): Xaa is Ala or Gln or Ile or Leu or Val
  SITE (118)..(118): Xaa is Gln or Pro
  SITE (120)..(120): Xaa is Ala or Leu
  SITE (121)..(121): Xaa is Glu or Ser
  SITE (123)..(123): Xaa is Ile or Leu or Ser or Val
  SITE (125)..(125): Xaa is Asn or Leu or Lys
  SITE (126)..(126): Xaa is Asp or Glu or Ser
  SITE (127)..(127): Xaa is Arg or Gln or Leu
  SITE (128)..(128): Xaa is Asn or Gly
  SITE (129)..(129): Xaa is Ile or Val
  SITE (131)..(131): Xaa is Ala or Gly or Ser or Val
  SITE (132)..(132): Xaa is Ile or Val
  SITE (133)..(133): Xaa is Arg or Lys or Pro
  SITE (134)..(134): Xaa is Leu or Phe
  SITE (135)..(135): Xaa is Ala or Ile or Leu or Trp
  SITE (137)..(137): Xaa is Phe or Ser
  SITE (139)..(139): Xaa is Ala or Leu or Val
  SITE (142)..(142): Xaa is Leu or Phe or Trp
  SITE (143)..(143): Xaa is Ala or Ser
  SITE (145)..(145): Xaa is Ile or Leu or Phe
  SITE (146)..(146): Xaa is Leu or Met or Phe or Trp or Val
  SITE (147)..(147): Xaa is Asn or Gln or Glu or His
  SITE (148)..(148): Xaa is His or Phe
  SITE (149)..(149): Xaa is Leu or Val
  SITE (150)..(150): Xaa is Arg or Asp or Lys or Thr
  SITE (151)..(151): Xaa is Arg or Asn or Lys
  SITE (152)..(152): Xaa is Leu or Pro
  SITE (154)..(154): Xaa is Asn or Glu or His or Val
  SITE (155)..(155): Xaa is Glu or Pro
  SITE (157)..(157): Xaa is Leu or Pro
  SITE (159)..(159): Xaa is Glu or Pro
  SITE (160)..(160): Xaa is Ala or Glu
  SITE (162)..(162): Xaa is Arg or Asp or Glu or His or Lys or Met or Ser or Tyr
  SITE (164)..(164): Xaa is Arg or Ser
  SITE (165)..(165): Xaa is Glu or Lys
  SITE (166)..(166): Xaa is Arg or Ile or Leu or Trp or Tyr
  SITE (167)..(167): Xaa is Ala or Glu
  SITE (168)..(168): Xaa is Gln or Leu or Lys
  SITE (169)..(169): Xaa is Ala or Asp or Gln or Val
  SITE (170)..(170): Xaa is Lys or Trp
  SITE (171)..(171): Xaa is His or Leu or Met
  SITE (172)..(172): Xaa is Arg or Tyr
  SITE (174)..(174): Xaa is Ala or Leu or Met
  SITE (175)..(175): Xaa is Met or Phe
  SITE (176)..(176): Xaa is Glu or Gly
  SITE (177)..(177): Xaa is Arg or Lys or Thr
  SITE (178)..(178): Xaa is Ala or Gln or Glu or Gly or Val
  SITE (179)..(179): Xaa is Gly or Pro
  SITE (180)..(180): Xaa is Asp or Lys or Pro or Thr
  SITE (181)..(181): Xaa is Asp or Glu
  SITE (182)..(182): Xaa is Arg or Asp or Glu or Leu or Lys
  SITE (183)..(183): Xaa is Asp or Phe
  SITE (185)..(185): Xaa is Leu or Phe
  SITE (186)..(186): Xaa is Ala or Val
  SITE (187)..(187): Xaa is Asp or Glu or Lys or Pro or Val
  SITE (188)..(188): Xaa is Ala or Gly or Phe
  SITE (189)..(189): Xaa is Arg or Asn or Gln or Pro or Ser
  SITE (190)..(190): Xaa is Ala or Asn or Cys or Lys or Met or Ser or Thr
  SITE (191)..(191): Xaa is Ala or Gln or Gly or Lys
  SITE (192)..(192): Xaa is Ala or Ile or Tyr
  SITE (193)..(193): Xaa is Ile or Leu or Met or Thr or Val
  SITE (195)..(195): Xaa is Ile or Met or Val
  SITE (196)..(196): Xaa is Cys or Met
  SITE (197)..(197): Xaa is Ser or Thr
  SITE (200)..(200): Xaa is Ala or Glu or Ile or Val
  SITE (201)..(201): Xaa is Ile or Leu
  SITE (206)..(206): Xaa is Ile or Leu or Met
  SITE (209)..(209): Xaa is Cys or Leu
  SITE (210)..(210): Xaa is Ala or Gln or Met or Ser or Thr
  SITE (211)..(211): Xaa is Glu or Lys or Thr
  SITE (212)..(212): Xaa is Leu or Trp
  SITE (213)..(213): Xaa is Met or Ser or Thr
  SITE (214)..(214): Xaa is Asn or Gly
  SITE (215)..(215): Xaa is Arg or Ile or Leu or Lys or Trp or Val
  SITE (216)..(216): Xaa is Gln or Lys
  SITE (217)..(217): Xaa is Ile or Val
  SITE (222)..(222): Xaa is Ala or Pro
  SITE (223)..(223): Xaa is Pro or Ser or Thr
  SITE (224)..(224): Xaa is Phe or Tyr or Val
  SITE (225)..(225): Xaa is Gln or Leu
  SITE (226)..(226): Xaa is Asp or Thr or Val
  SITE (227)..(227): Xaa is Ala or Leu or Pro
  SITE (228)..(228): Xaa is Asn or Leu or Thr or Val
  SITE (229)..(229): Xaa is Phe or Pro or Thr or Tyr
  SITE (230)..(230): Xaa is Asn or Asp or Glu or Leu or Ser
  SITE (232)..(232): Xaa is Ala or Asn or Asp or Glu or Ile or Leu
  SITE (233)..(233): Xaa is Arg or Asp or Gly or Ser or Tyr
  SITE (235)..(235): Xaa is Ile or Lys or Met or Pro or Ser or Val
  SITE (238)..(238): Xaa is Ile or Met
  SITE (239)..(239): Xaa is Arg or Asp or Lys
  SITE (242)..(242): Xaa is Asp or Gly
  SITE (243)..(243): Xaa is Lys or Thr
  SITE (245)..(245): Xaa is Asp or Pro
  SITE (246)..(246): Xaa is Glu or Leu or Pro or Thr
  SITE (247)..(247): Xaa is Asn or His
  SITE (248)..(248): Xaa is Ala or Ser
  SITE (249)..(249): Xaa is Thr or Val
  SITE (251)..(251): Xaa is Phe or Tyr
  SITE (258)..(258): Xaa is Ala or Tyr
  SITE (262)..(262): Xaa is Arg or Lys
  SITE (264)..(264): Xaa is Asp or Gln
  SITE (265)..(265): Xaa is Leu or Met
  SITE (268)..(268): Xaa is Ile or Leu or Val
  SITE (270)..(270): Xaa is His or Phe or Trp
  SITE (273)..(273): Xaa is Glu or Val
  SITE (276)..(276): Xaa is Asn or Gly
  SITE (277)..(277): Xaa is Ala or Ile or Ser or Val
  SITE (279)..(279): Xaa is Ala or Phe
  SITE (281)..(281): Xaa is Ile or Trp
  SITE (283)..(283): Xaa is Ala or Val
  SITE (289)..(289): Xaa is Ala or Arg or Glu or Val
  SITE (290)..(290): Xaa is Arg or Glu or Lys
  SITE (291)..(291): Xaa is Ala or Arg or Gln or Ile or Leu or Val
  SITE (292)..(292): Xaa is Arg or Asn or His or Leu or Thr
  SITE (293)..(293): Xaa is Ala or Leu
  SITE (294)..(294): Xaa is Glu or Ile
  SITE (295)..(295): Xaa is Asp or Glu
  SITE (296)..(296): Xaa is Ala or Val
  SITE (299)..(299): Xaa is Arg or Lys or Pro or Ser
  SITE (301)..(301): Xaa is Phe or Thr
  SITE (302)..(302): Xaa is Leu or Ser
  SITE (303)..(303): Xaa is Asp or Glu
  SITE (305)..(305): Xaa is Gly or Ile or Val
  SITE (306)..(306): Xaa is Arg or Gly
  SITE (307)..(307): Xaa is Asp or Glu
  SITE (309)..(309): Xaa is Ala or Gly
  SITE (310)..(310): Xaa is Arg or Met or Tyr
  SITE (311)..(311): Xaa is Trp or Val
  SITE (312)..(312): Xaa is Arg or Leu
  SITE (313)..(313): Xaa is Asp or Pro or Thr
  SITE (320)..(320): Xaa is Cys or His
  SITE (323)..(323): Xaa is Asn or Lys or Ser
  SITE (325)..(325): Xaa is Lys or Pro or Ser
  SITE (326)..(326): Xaa is Ala or Ser
  SITE (327)..(327): Xaa is Ile or Thr or Val
  SITE (331)..(331): Xaa is Ile or Met or Val
  SITE (339)..(339): Xaa is Ile or Trp or Val
  SITE (340)..(340): Xaa is Leu or Met
  SITE (342)..(342): Xaa is Ala or Ser
  SITE (343)..(343): Xaa is Ile or Leu
  SITE (344)..(344): Xaa is Asp or His or Tyr
  SITE (365)..(365): Xaa is Ile or Leu or Met or Val
  SITE (366)..(366): Xaa is Arg or Asn or Val
  SITE (368)..(368): Xaa is Leu or Met or Trp
  SITE (370)..(370): Xaa is Ile or Val
  SITE (374)..(374): Xaa is Ile or Val
  SITE (375)..(375): Xaa is Arg or Pro or Ser or Val
  SITE (377)..(377): Xaa is Arg or Asp or Gln
  SITE (378)..(378): Xaa is Asp or Glu
  SITE (379)..(379): Xaa is Asn or Asp or Glu or Leu
  SITE (381)..(381): Xaa is Arg or Lys or Ser
  SITE (382)..(382): Xaa is Ile or Val
  SITE (383)..(383): Xaa is His or Pro
  SITE (385)..(385): Xaa is Ala or Asn or Asp or Glu or Gly
  SITE (386)..(386): Xaa is Ala or Glu
  SITE (389)..(389): Xaa is Arg or Gln or Glu or Lys
  SITE (390)..(390): Xaa is Cys or Thr or Val
  SITE (391)..(391): Xaa is Ile or Leu or Val
  SITE (392)..(392): Xaa is Arg or Lys
  SITE (393)..(393): Xaa is Asp or Glu or Ser
  SITE (395)..(395): Xaa is Ile or Met or Val
  SITE (396)..(396): Xaa is Asn or Cys or Gly or Phe or Ser or Thr or Val
  SITE (397)..(397): Xaa is Glu or Gly
  SITE (398)..(398): Xaa is Ala or Lys or Pro
  SITE (399)..(399): Xaa is Ile or Leu or Thr
  SITE (401)..(401): Xaa is Gln or Glu
  SITE (402)..(402): Xaa is Asn or Glu or Ile or Lys
  SITE (405)..(405): Xaa is Ala or Arg or His or Lys
  SITE (406)..(406): Xaa is Asn or Lys
  SITE (408)..(408): Xaa is Ala or Arg or Lys
  SITE (409)..(409): Xaa is Asp or Glu
  SITE (410)..(410): Xaa is Ile or Leu
  SITE (411)..(411): Xaa is Ala or Gly or Ser
  SITE (412)..(412): Xaa is Ala or Arg or Glu or Leu or Lys or Thr
  SITE (413)..(413): Xaa is Arg or Asn or Lys
  SITE (414)..(414): Xaa is Leu or Trp
  SITE (415)..(415): Xaa is Arg or Lys
  SITE (416)..(416): Xaa is Ala or Arg or Glu or Leu or Ser
  SITE (417)..(417): Xaa is Ala or Arg or Ile or Lys or Thr
  SITE (419)..(419): Xaa is Asn or Asp or Glu or Gly or Lys
  SITE (420)..(420): Xaa is Glu or Pro or Val
  SITE (423)..(423): Xaa is Asn or Asp or Gln or Gly or Thr
  SITE (424)..(424): Xaa is Ala or Ile or Lys
  SITE (425)..(425): Xaa is Ala or Leu
  SITE (426)..(426): Xaa is Ala or Met or Val
  SITE (427)..(427): Xaa is Glu or Leu
  SITE (428)..(428): Xaa is Ala or Glu
  SITE (429)..(429): Xaa is Leu or Phe or Tyr
  SITE (430)..(430): Xaa is Ile or Leu or Lys or Met
  SITE (431)..(431): Xaa is Ala or Arg or Gln or Leu or Lys or Ser
  SITE (433)..(433): Xaa is Cys or Gly or His
  SITE (434)..(434): Xaa is Arg or Gln or His or Lys or Phe or Pro or Thr or Tyr or Val
  SITE (435)..(435): Xaa is Asn or His or Lys
  SITE (436)..(436): Xaa is Arg or Leu
  SITE (437)..(437): Xaa is Ala or Arg or Asn or Leu or Ser
  SITE (439)..(439): Xaa is Ala or Leu or Lys or Phe or Ser or Thr or Tyr
  SITE (440)..(440): Xaa is Asn or Lys or Val
XXXXVXMXPWLXLGHXNPXLRXAXXXAXRXXXXXXXXTXXXLXXXXXRIXXXYXXXIXLXXXXLPXLPELPXXXXTTNXLPPHLNXXLXXXXXXXXPXXSKXXXXXXXXLXXXDXLXXWXXKXAXXXXXPXXXXXTXGXALXXYXXXXXXXXGXXFXFXXIXLXXXXXXXXXEXXXXXXXXXXFXXXXXXXXXLXXXSRXXEAKYXDYXXXXXXXXXVPVGXXXXXXXXXDXXDXELXXWLXXKXXXXXVXVSFGSEXFLSXEXXEEXAXGLXLSXXNXIXVXRFPKGXXXXXXXXLPXGXXXRXXXRXXXXXHLVPQAXILXHXXXGGFXSHCGWNSXXEXXXFGVPIIAMPMQWDQPINARLXXEXGXAVEXXRXXXGXXXRXXIAXXXXXVXXXXXGXXLRXXVXXXXXXXXXXRXXEMXXXXXXXXXLXXXXXAXX

SEQ ID NO: 1229 - protein, 793 aa, Artificial Sequence
  engineered sucrose synthase
  SITE (4)..(4): Xaa is Ala or Arg or Glu or Ser or Val
  SITE (6)..(6): Xaa is Arg or Asp or Glu
  SITE (7)..(7): Xaa is Gln or Glu
  SITE (8)..(8): Xaa is Gln or Phe
  SITE (10)..(10): Xaa is Ala or Arg or Gln or His or Leu or Lys or Ser
  SITE (11)..(11): Xaa is Asp or Gln or Glu or Ser
  SITE (12)..(12): Xaa is Asn or His or Ser
  SITE (13)..(13): Xaa is Arg or Pro
  SITE (14)..(14): Xaa is Arg or Asn or Asp or Glu
  SITE (15)..(15): Xaa is Ala or Asp or Gln or Glu or Ser or Thr
  SITE (16)..(16): Xaa is Leu or Trp or Val
  SITE (17)..(17): Xaa is Arg or His or Tyr
  SITE (18)..(18): Xaa is Ala or Arg or Leu
  SITE (19)..(19): Xaa is Leu or Phe
  SITE (22)..(22): Xaa is Arg or His
  SITE (23)..(23): Xaa is Leu or Tyr
  SITE (24)..(24): Xaa is Leu or Val
  SITE (25)..(25): Xaa is Ala or Gly
  SITE (26)..(26): Xaa is Gln or Leu or Ser
  SITE (27)..(27): Xaa is Gln or Gly
  SITE (29)..(29): Xaa is Asp or Gly or Pro or Thr
  SITE (30)..(30): Xaa is Ile or Leu or Met or Phe or Ser
  SITE (31)..(31): Xaa is Leu or Trp
  SITE (32)..(32): Xaa is Gln or Leu
  SITE (33)..(33): Xaa is Arg or His
  SITE (34)..(34): Xaa is His or Ser or Thr
  SITE (37)..(37): Xaa is Gln or Trp
  SITE (38)..(38): Xaa is Arg or Asp or His
  SITE (39)..(39): Xaa is Ala or Glu
  SITE (40)..(40): Xaa is Cys or Leu or Phe
  SITE (41)..(41): Xaa is Ala or Asp or Glu or Leu or Lys
  SITE (42)..(42): Xaa is Ala or Arg or Asn or Asp or Glu or Thr
  SITE (44)..(44): Xaa is Arg or Cys or Tyr
  SITE (45)..(45): Xaa is Ala or Glu
  SITE (46)..(46): Xaa is Gln or Glu or Pro
  SITE (47)..(47): Xaa is Asp or Gln or Glu or Pro
  SITE (48)..(48): Xaa is Asp or Gly or Pro
  SITE (49)..(49): Xaa is Asn or Glu
  SITE (50)..(50): Xaa is Glu or Gly
  SITE (51)..(51): Xaa is Glu or Ser or Tyr
  SITE (52)..(52): Xaa is Ala or Glu or Gly or Leu or Pro
  SITE (53)..(53): Xaa is Glu or Leu
  SITE (54)..(54): Xaa is Ala or Asp or Cys or Gly or Leu or Lys or Met or Thr
  SITE (55)..(55): Xaa is Asp or Gly or Ile or Ser or Thr
  SITE (56)..(56): Xaa is Gly or Ser
  SITE (57)..(57): Xaa is Ala or Pro or Trp or Val
  SITE (58)..(58): Xaa is Leu or Phe
  SITE (59)..(59): Xaa is Ala or Glu or Gly
  SITE (60)..(60): Xaa is Arg or Asp or Gln or Glu
  SITE (61)..(61): Xaa is Ala or Leu or Phe or Val
  SITE (62)..(62): Xaa is Ile or Val
  SITE (63)..(63): Xaa is Ala or Arg or Gln or Glu or Lys
  SITE (64)..(64): Xaa is Ala or Arg or His or Lys
  SITE (65)..(65): Xaa is Ala or Cys or Thr
  SITE (69)..(69): Xaa is Ala or Ile or Val
  SITE (70)..(70): Xaa is Ile or Leu or Phe or Val
  SITE (71)..(71): Xaa is Arg or Asp or Glu or His or Leu
  SITE (72)..(72): Xaa is Ala or Asp
  SITE (75)..(75): Xaa is Ala or Ile or Leu or Met or Phe or Val
  SITE (76)..(76): Xaa is Cys or Tyr or Val
  SITE (77)..(77): Xaa is Leu or Phe
  SITE (79)..(79): Xaa is Ile or Leu or Trp or Val
  SITE (81)..(81): Xaa is Glu or Leu or Pro
  SITE (83)..(83): Xaa is Pro or Val
  SITE (84)..(84): Xaa is Ala or Gly
  SITE (85)..(85): Xaa is Arg or Val
  SITE (87)..(87): Xaa is Arg or Glu or Tyr
  SITE (89)..(89): Xaa is Leu or Tyr or Val
  SITE (91)..(91): Xaa is Ile or Phe
  SITE (93)..(93): Xaa is Ile or Leu or Val
  SITE (95)..(95): Xaa is Asp or Gln or Thr
  SITE (97)..(97): Xaa is Ala or Asp or Glu or Thr or Val
  SITE (101)..(101): Xaa is Ile or Leu or Val
  SITE (102)..(102): Xaa is Asp or Ser or Thr
  SITE (103)..(103): Xaa is Thr or Val
  SITE (104)..(104): Xaa is Asp or Glu or Ser
  SITE (106)..(106): Xaa is Phe or Tyr
  SITE (108)..(108): Xaa is Ala or Gln
  SITE (109)..(109): Xaa is Ala or Phe
  SITE (112)..(112): Xaa is Arg or Gln or Glu
  SITE (115)..(115): Xaa is Asn or Asp or Gly or Lys or Thr
  SITE (116)..(116): Xaa is Gly or Leu
  SITE (117)..(117): Xaa is Ala or Asn or Asp or Glu or Gly
  SITE (118)..(118): Xaa is Ala or Gln or Gly or His or Pro or Ser
  SITE (121)..(121): Xaa is Asn or Asp or Glu or Pro
  SITE (124)..(124): Xaa is Leu or Thr or Trp
  SITE (125)..(125): Xaa is Glu or Lys or Thr
  SITE (126)..(126): Xaa is Ile or Trp or Val
  SITE (128)..(128): Xaa is Leu or Phe or Trp
  SITE (129)..(129): Xaa is Glu or Gly
  SITE (131)..(131): Xaa is Leu or Phe
  SITE (132)..(132): Xaa is Arg or Asn
  SITE (133)..(133): Xaa is Arg or Pro
  SITE (134)..(134): Xaa is Asn or Glu or Gly or His or Ser or Thr or Val
  SITE (135)..(135): Xaa is Phe or Ser or Val
  SITE (137)..(137): Xaa is Arg or Lys
  SITE (138)..(138): Xaa is Leu or Met
  SITE (146)..(146): Xaa is Arg or Asn or Asp
  SITE (148)..(148): Xaa is Leu or Val
  SITE (149)..(149): Xaa is Gln or Glu or Thr
  SITE (156)..(156): Xaa is Ala or Ser
  SITE (159)..(159): Xaa is Ile or Leu or Met
  SITE (161)..(161): Xaa is Gln or Gly or Thr
  SITE (163)..(163): Xaa is Leu or Thr
  SITE (164)..(164): Xaa is Ala or Gly or Lys
  SITE (165)..(165): Xaa is Ala or Arg or Asp or Gln or Glu or Gly or Lys
  SITE (167)..(167): Xaa is Arg or Asp or Leu or Met
  SITE (168)..(168): Xaa is Asp or Gln or Glu or Ser or Tyr
  SITE (169)..(169): Xaa is Ala or Arg or Gln or Lys
  SITE (170)..(170): Xaa is Ile or Leu
  SITE (171)..(171): Xaa is Ile or Leu
  SITE (172)..(172): Xaa is Asp or Glu
  SITE (173)..(173): Xaa is Phe or Trp
  SITE (175)..(175): Xaa is Arg or Gly or Ser
  SITE (176)..(176): Xaa is Leu or Val
  SITE (178)..(178): Xaa is Arg or Gln
  SITE (179)..(179): Xaa is His or Ile or Leu or Tyr
  SITE (180)..(180): Xaa is Arg or Asp
  SITE (181)..(181): Xaa is Asn or Gly
  SITE (182)..(182): Xaa is Arg or Gln
  SITE (183)..(183): Xaa is Asn or Gln or His
  SITE (185)..(185): Xaa is Gly or Met
  SITE (187)..(187): Xaa is Asn or Ser
  SITE (188)..(188): Xaa is Asn or Asp or Glu
  SITE (189)..(189): Xaa is Arg or Gly
  SITE (190)..(190): Xaa is Asn or Ile or Met or Phe
  SITE (191)..(191): Xaa is Arg or Gln or Lys or Thr
  SITE (192)..(192): Xaa is Asp or Ser
  SITE (195)..(195): Xaa is Ala or Glu or Gly or Ser
  SITE (198)..(198): Xaa is Arg or Gln
  SITE (199)..(199): Xaa is Ala or Thr or Val
  SITE (200)..(200): Xaa is Glu or Ile or Leu or Met or Val
  SITE (205)..(205): Xaa is Arg or Gly or Lys or Thr
  SITE (206)..(206): Xaa is Gln or Leu
  SITE (208)..(208): Xaa is Ala or Arg or Asp or Glu or Pro
  SITE (209)..(209): Xaa is Asp or Glu
  SITE (210)..(210): Xaa is Ala or Thr
  SITE (212)..(212): Xaa is Leu or Trp
  SITE (213)..(213): Xaa is Ala or Glu or Ser
  SITE (214)..(214): Xaa is Asp or Glu
  SITE (215)..(215): Xaa is Leu or Phe or Val
  SITE (216)..(216): Xaa is Ala or Arg or Gln or Glu or Gly
  SITE (217)..(217): Xaa is Glu or His or Pro
  SITE (218)..(218): Xaa is Ala or Arg or Asp or Glu or Lys or Thr
  SITE (219)..(219): Xaa is Leu or Met
  SITE (220)..(220): Xaa is Arg or Gln
  SITE (221)..(221): Xaa is Arg or Glu
  SITE (222)..(222): Xaa is Arg or Leu or Met or Trp
  SITE (228)..(228): Xaa is Leu or Trp
  SITE (230)..(230): Xaa is Arg or Asn or Asp
  SITE (232)..(232): Xaa is Ala or Val
  SITE (233)..(233): Xaa is Ala or Gln or Glu or Gly
  SITE (235)..(235): Xaa is Ile or Met or Val
  SITE (237)..(237): Xaa is Asp or Glu
  SITE (239)..(239): Xaa is Leu or Met
  SITE (243)..(243): Xaa is Met or Val
  SITE (245)..(245): Xaa is Ile or Leu
  SITE (252)..(252): Xaa is Ala or Arg or Glu or Gly or Ser
  SITE (253)..(253): Xaa is Ala or Asn or Thr
  SITE (256)..(256): Xaa is Arg or Glu or Lys or Ser or Thr
  SITE (259)..(259): Xaa is Ala or Asp or Gly
  SITE (261)..(261): Xaa is Ile or Val
  SITE (263)..(263): Xaa is Leu or Met
  SITE (265)..(265): Xaa is Phe or Ser
  SITE (266)..(266): Xaa is Asn or Ser
  SITE (267)..(267): Xaa is Ile or Leu or Val
  SITE (268)..(268): Xaa is Ala or Ile or Leu or Thr or Val
  SITE (270)..(270): Xaa is Ile or Leu or Val
  SITE (272)..(272): Xaa is Ile or Pro or Val
  SITE (275)..(275): Xaa is Trp or Tyr
  SITE (277)..(277): Xaa is Ala or Gly
  SITE (279)..(279): Xaa is Ala or Asp or Ser
  SITE (280)..(280): Xaa is Asn or Lys
  SITE (284)..(284): Xaa is Arg or Leu or Tyr
  SITE (293)..(293): Xaa is Phe or Trp or Tyr
  SITE (298)..(298): Xaa is Ala or Val
  SITE (303)..(303): Xaa is Arg or Lys
  SITE (305)..(305): Xaa is Ile or Leu or Met
  SITE (307)..(307): Xaa is Arg or Asn or Asp or Gln or Glu or Lys
  SITE (310)..(310): Xaa is Ala or Arg or His or Tyr
  SITE (311)..(311): Xaa is Gln or Glu
  SITE (314)..(314): Xaa is Leu or Val
  SITE (316)..(316): Xaa is Ile or Val
  SITE (319)..(319): Xaa is Arg or Gln
  SITE (321)..(321): Xaa is Ile or Leu
  SITE (322)..(322): Xaa is Ile or Val
  SITE (323)..(323): Xaa is Ala or Ile or Leu or Val
  SITE (329)..(329): Xaa is Asp or Glu
  SITE (330)..(330): Xaa is Ala or Ser
  SITE (331)..(331): Xaa is Arg or Asp or Glu or Gly or Lys
  SITE (342)..(342): Xaa is Ile or Val
  SITE (343)..(343): Xaa is His or Ser or Val
  SITE (345)..(345): Xaa is Ala or Thr
  SITE (346)..(346): Xaa is Arg or Glu
  SITE (347)..(347): Xaa is Asn or His or Tyr
  SITE (348)..(348): Xaa is Ala or Val
  SITE (349)..(349): Xaa is Arg or Gln or His or Trp
  SITE (353)..(353): Xaa is Ile or Val
  SITE (357)..(357): Xaa is Asn or Tyr
  SITE (359)..(359): Xaa is Asp or Ser
  SITE (361)..(361): Xaa is Arg or Asn or Glu or Thr
  SITE (362)..(362): Xaa is Ile or Val
  SITE (363)..(363): Xaa is His or Ile or Leu or Val
  SITE (365)..(365): Xaa is Gln or His
  SITE (371)..(371): Xaa is Arg or Glu or Lys
  SITE (372)..(372): Xaa is Ile or Val
  SITE (379)..(379): Xaa is Phe or Trp or Tyr
  SITE (380)..(380): Xaa is Ala or Val
  SITE (381)..(381): Xaa is Arg or Gln or Glu or Leu or Ser
  SITE (383)..(383): Xaa is Ala or Leu or Val
  SITE (385)..(385): Xaa is Arg or Lys
  SITE (387)..(387): Xaa is Ile or Leu or Val
  SITE (388)..(388): Xaa is Leu or Lys
  SITE (393)..(393): Xaa is Gly or Ser
  SITE (397)..(397): Xaa is Ala or Leu or Val
  SITE (406)..(406): Xaa is Asn or Gly
  SITE (408)..(408): Xaa is Ile or Val
  SITE (410)..(410): Xaa is Ser or Thr
  SITE (411)..(411): Xaa is Ile or Leu
  SITE (412)..(412): Xaa is Ile or Leu or Met
  SITE (413)..(413): Xaa is Ala or Ser
  SITE (414)..(414): Xaa is Gln or Glu
  SITE (416)..(416): Xaa is Leu or Trp
  SITE (418)..(418): Xaa is Ile or Val
  SITE (421)..(421): Xaa is Cys or Ile or Met or Thr or Val
  SITE (423)..(423): Xaa is Ile or Phe
  SITE (430)..(430): Xaa is Ser or Thr
  SITE (433)..(433): Xaa is Leu or Pro
  SITE (434)..(434): Xaa is Asp or Gly or Tyr
  SITE (438)..(438): Xaa is His or Tyr
  SITE (440)..(440): Xaa is Arg or Lys or Pro
  SITE (441)..(441): Xaa is Arg or Asp or Leu or Lys
  SITE (442)..(442): Xaa is Asn or His or Phe or Tyr
  SITE (444)..(444): Xaa is Ala or Asp or Gln or Glu or Pro
  SITE (445)..(445): Xaa is Asp or Gln or Lys
  SITE (446)..(446): Xaa is His or Tyr
  SITE (449)..(449): Xaa is Ala or Ser
  SITE (456)..(456): Xaa is Leu or Trp
  SITE (464)..(464): Xaa is Ala or Ile or Phe or Val
  SITE (466)..(466): Xaa is Ile or Val
  SITE (476)..(476): Xaa is Asn or Thr
  SITE (478)..(478): Xaa is Arg or Asn or Asp or His
  SITE (479)..(479): Xaa is Glu or Ser
  SITE (486)..(486): Xaa is His or Tyr
  SITE (487)..(487): Xaa is Ala or Gln or Gly or Ser or Thr
  SITE (488)..(488): Xaa is Ala or Asp or His or Ser
  SITE (489)..(489): Xaa is Phe or Tyr
  SITE (491)..(491): Xaa is Leu or Met
  SITE (497)..(497): Xaa is Ile or Val
  SITE (498)..(498): Xaa is Glu or Ile or Val
  SITE (499)..(499): Xaa is Asn or His
  SITE (501)..(501): Xaa is Ile or Val
  SITE (506)..(506): Xaa is Pro or Ser
  SITE (507)..(507): Xaa is Arg or Lys
  SITE (511)..(511): Xaa is Ile or Val
  SITE (517)..(517): Xaa is Ala or Pro
  SITE (518)..(518): Xaa is Arg or Asp or Glu or Ser
  SITE (519)..(519): Xaa is Ile or Thr or Val
  SITE (522)..(522): Xaa is Pro or Ser
  SITE (524)..(524): Xaa is Ala or Ser or Thr
  SITE (525)..(525): Xaa is Arg or Asp or Glu
  SITE (526)..(526): Xaa is His or Lys or Thr
  SITE (528)..(528): Xaa is Arg or Glu or Lys
  SITE (530)..(530): Xaa is Leu or Phe
  SITE (531)..(531): Xaa is Ser or Thr
  SITE (532)..(532): Xaa is Gly or Ser
  SITE (534)..(534): Xaa is His or Trp
  SITE (539)..(539): Xaa is Arg or Glu or Lys or Ser
  SITE (540)..(540): Xaa is Ile or Leu or Met
  SITE (541)..(541): Xaa is Ile or Leu or Trp or Val
  SITE (542)..(542): Xaa is Phe or Tyr
  SITE (543)..(543): Xaa is Gly or Ser
  SITE (544)..(544): Xaa is Arg or Asp or Gly or Pro
  SITE (545)..(545): Xaa is Asp or Glu or Pro
  SITE (546)..(546): Xaa is Asp or Gln or Glu or Pro or Thr
  SITE (547)..(547): Xaa is Arg or Gly
  SITE (548)..(548): Xaa is Ala or Gly or Pro
  SITE (549)..(549): Xaa is Asp or Glu or Pro
  SITE (550)..(550): Xaa is Ala or His or Ile
  SITE (555)..(555): Xaa is Ala or Glu or Lys or Ser
  SITE (557)..(557): Xaa is Arg or Pro
  SITE (558)..(558): Xaa is Asp or Gln or Ser
  SITE (561)..(561): Xaa is Ile or Leu or Val
  SITE (562)..(562): Xaa is Ile or Leu
  SITE (563)..(563): Xaa is Leu or Phe
  SITE (564)..(564): Xaa is Ser or Thr
  SITE (565)..(565): Xaa is Ile or Met or Val
  SITE (566)..(566): Xaa is Ala or Met or Ser
  SITE (568)..(568): Xaa is Leu or Met
  SITE (574)..(574): Xaa is Gln or Ile or Leu or Met
  SITE (575)..(575): Xaa is Ser or Thr
  SITE (577)..(577): Xaa is Leu or Trp
  SITE (578)..(578): Xaa is Ala or Leu or Met or Val
  SITE (580)..(580): Xaa is Ile or Leu or Trp
  SITE (581)..(581): Xaa is Phe or Tyr or Val
  SITE (583)..(583): Xaa is Ala or Arg
  SITE (584)..(584): Xaa is Asn or Ser
  SITE (585)..(585): Xaa is Ala or Asn or Glu or Pro or Ser
  SITE (589)..(589): Xaa is Glu or Ser
  SITE (594)..(594): Xaa is Ile or Leu or Val
  SITE (595)..(595): Xaa is Ile or Leu or Val
  SITE (596)..(596): Xaa is Ile or Val
  SITE (597)..(597): Xaa is Ala or Gly
  SITE (600)..(600): Xaa is Ile or Val
  SITE (602)..(602): Xaa is Ala or Pro or Val
  SITE (603)..(603): Xaa is Ala or Asn or Gln or Glu or Gly or Ser
  SITE (604)..(604): Xaa is Ala or Arg or Asn or Gln or Glu or Lys
  SITE (606)..(606): Xaa is Ala or Arg or Asn or Asp or Gly or Met or Ser or Thr
  SITE (608)..(608): Xaa is Ala or Arg or Glu or Gly or His or Ser
  SITE (611)..(611): Xaa is Arg or Gln
  SITE (612)..(612): Xaa is Ala or Glu
  SITE (613)..(613): Xaa is Gln or Glu
  SITE (614)..(614): Xaa is Ile or Met or Val
  SITE (615)..(615): Xaa is Ala or Arg or Gln or Glu or Gly or Lys
  SITE (617)..(617): Xaa is Ile or Leu or Met
  SITE (619)..(619): Xaa is Gln or Glu
  SITE (620)..(620): Xaa is Ile or Leu
  SITE (621)..(621): Xaa is Ile or Leu or Met
  SITE (623)..(623): Xaa is Arg or Glu or His or Lys
  SITE (624)..(624): Xaa is His or Tyr
  SITE (625)..(625): Xaa is Asn or Gln or Gly
  SITE (630)..(630): Xaa is Ala or Met or Phe or Val
  SITE (632)..(632): Xaa is Leu or Trp
  SITE (633)..(633): Xaa is Ile or Leu or Val
  SITE (635)..(635): Xaa is Ala or Leu or Ser or Val
  SITE (636)..(636): Xaa is Gln or His
  SITE (638)..(638): Xaa is Asn or Asp or Glu
  SITE (640)..(640): Xaa is Arg or Asn or Thr or Val
  SITE (641)..(641): Xaa is Arg or Leu or Trp or Val
  SITE (645)..(645): Xaa is Ile or Leu
  SITE (648)..(648): Xaa is Trp or Tyr or Val
  SITE (649)..(649): Xaa is Ile or Leu or Val
  SITE (652)..(652): Xaa is Arg or Gln or Gly or His or Lys or Thr
  SITE (655)..(655): Xaa is Ala or Ile or Val
  SITE (656)..(656): Xaa is Phe or Trp or Val
  SITE (657)..(657): Xaa is Ile or Val
  SITE (662)..(662): Xaa is Phe or Tyr
  SITE (672)..(672): Xaa is Ala or Val
  SITE (674)..(674): Xaa is Ala or Ser or Thr
  SITE (679)..(679): Xaa is Thr or Val
  SITE (680)..(680): Xaa is Phe or Trp
  SITE (683)..(683): Xaa is Arg or Cys
  SITE (684)..(684): Xaa is His or Tyr
  SITE (688)..(688): Xaa is Ala or Leu
  SITE (693)..(693): Xaa is Asp or His
  SITE (704)..(704): Xaa is Asp or Gln or His
  SITE (705)..(705): Xaa is Gly or Pro
  SITE (706)..(706): Xaa is Asp or Glu
  SITE (707)..(707): Xaa is Ala or Gln or Glu
  SITE (708)..(708): Xaa is Ala or Thr or Val
  SITE (709)..(709): Xaa is Ala or Leu
  SITE (711)..(711): Xaa is Arg or Ile or Leu or Lys
  SITE (712)..(712): Xaa is Ile or Leu or Met
  SITE (715)..(715): Xaa is Phe or Trp
  SITE (716)..(716): Xaa is Leu or Phe
  SITE (718)..(718): Xaa is Ala or Arg or His or Lys
  SITE (719)..(719): Xaa is Ala or Cys
  SITE (720)..(720): Xaa is Ala or Arg or Lys
  SITE (721)..(721): Xaa is Ala or Asn or Glu
  SITE (722)..(722): Xaa is Arg or Asn or Asp or Glu
  SITE (724)..(724): Xaa is Asp or Gly or Lys or Ser or Thr
  SITE (728)..(728): Xaa is Arg or Glu or Lys
  SITE (731)..(731): Xaa is Arg or Asp or Gln
  SITE (732)..(732): Xaa is Ala or Gly
  SITE (735)..(735): Xaa is Ala or Gln or Glu or Lys
  SITE (738)..(738): Xaa is Arg or Glu or Ser or Tyr
  SITE (739)..(739): Xaa is Ala or Glu or Ser
  SITE (744)..(744): Xaa is Glu or Lys
  SITE (745)..(745): Xaa is Arg or Leu
  SITE (746)..(746): Xaa is Trp or Tyr
  SITE (750)..(750): Xaa is Leu or Met or Trp
  SITE (751)..(751): Xaa is Ala or Leu or Met
  SITE (753)..(753): Xaa is Ile or Leu
  SITE (754)..(754): Xaa is Ala or Ile or Leu or Met or Ser or Val
  SITE (756)..(756): Xaa is Ala or Cys or Ile or Val
  SITE (757)..(757): Xaa is Ala or Ile or Met or Phe or Trp or Tyr
  SITE (761)..(761): Xaa is Arg or Lys
  SITE (762)..(762): Xaa is Phe or Tyr
  SITE (764)..(764): Xaa is Leu or Ser or Thr
  SITE (765)..(765): Xaa is Asn or Lys or Ser
  SITE (768)..(768): Xaa is Arg or His or Ser
  SITE (771)..(771): Xaa is Met or Thr
  SITE (772)..(772): Xaa is Arg or Glu
  SITE (778)..(778): Xaa is Ile or Phe
  SITE (783)..(783): Xaa is Phe or Trp or Tyr
  SITE (792)..(792): Xaa is Leu or Met
MIEXLXXXLXXXXXXXXXXLRXXXXXXRXXXXXXDLXXXXXXFXXXXXXXXXXXXXXXXXXXXXXQEAXXXXPWXXXAXRXRXXXWXYXRXHXEXLXVEEXXXXEXLXXKEXLVXXXXEGXAVXXXDXXDXXXXXQXXKDESTIGXGXXHLNRHLXGRXWXDXXXGXXXXXXXLXXHXXXXXXLXLXXXXXXFDXLRXXXQYLGXXPXXXPXXXXXXXXXXXGFEPGXGXTXXRXRXTXRLLXDXLDSPSPXXLEXFLXRXPXIXXXXIXSXHGXFXQXXVLGXPDTGGQVVXILDQXRALEXEXRXRLXXQGXDXEPXIXXXTRLIPXXXGTTCDQRLEPXXGXXXXXILRXPFRXEXGXXXPXWISRFXXWPYLERXXXDXEXEXXAELGXRPDXIIGNYSDGXLXAXXXXXKXGXTQXNXAHALEKXKYXXSDLXWXXXEXXXHFXCQFTADXIAMNAADXIXTSTYQEIAGXDXXVGQYESXXXXTXPGLYRXXXGXDVFDXXFNIXSPGADXXXYFXYXXXEXRXXXLXPEIEXXXXXXXXXXXXRGVLXDXXKPXXXXXXRXDRIKNXXGXXEXXGXXXRLRXLANLXXXXGHXDXXXSXDXEEXXXXXRXHXXXDXXXLDGQXRXXGXXLXKXXVGEXYRXXADXRGXXXQPALXEAFGLTVIEXMXSGLPXXATXXGGPXEIIEXGVSGFHIDPNXXXXXXEXXADXXEXXXXXPXYWEXISXXALXRVXXRYTWXXXAERXXTXXRXXGFWXXVXXREXQVXXRYLQMXRHLQXRPLAHAVPXE

SEQ ID NO: 1230 - protein, 808 aa, Artificial Sequence
  engineered sucrose synthase
  SITE (9)..(9): Xaa is Met or Val
  SITE (10)..(10): Xaa is Leu or Trp or Val
  SITE (14)..(14): Xaa is Glu or His
  SITE (16)..(16): Xaa is Ala or Asn or Glu
  SITE (17)..(17): Xaa is Ala or Asp or Glu
  SITE (19)..(19): Xaa is Arg or His
  SITE (22)..(22): Xaa is Ile or Leu or Phe or Ser
  SITE (24)..(24): Xaa is Ile or Tyr
  SITE (26)..(26): Xaa is Arg or Asp or Gln
  SITE (27)..(27): Xaa is Ala or Arg or Asp or Leu
  SITE (28)..(28): Xaa is Gln or Gly or Lys or Ser
  SITE (29)..(29): Xaa is Glu or Gly
  SITE (31)..(31): Xaa is Arg or Gly
  SITE (43)..(43): Xaa is Ala or Asp or Glu
  SITE (47)..(47): Xaa is Arg or His
  SITE (51)..(51): Xaa is Arg or Lys
  SITE (53)..(53): Xaa is Ala or Glu or Val
  SITE (54)..(54): Xaa is Pro or Tyr
  SITE (55)..(55): Xaa is Phe or Pro
  SITE (56)..(56): Xaa is Pro or Tyr
  SITE (57)..(57): Xaa is His or Ser
  SITE (58)..(58): Xaa is Asn or Glu or Ser
  SITE (60)..(60): Xaa is Arg or Ser
  SITE (62)..(62): Xaa is Ala or Ser or Trp
  SITE (65)..(65): Xaa is Ile or Val
  SITE (66)..(66): Xaa is Arg or His or Phe or Tyr
  SITE (73)..(73): Xaa is Ile or Val
  SITE (75)..(75): Xaa is Asn or Glu
  SITE (77)..(77): Xaa is Ser or Trp
  SITE (79)..(79): Xaa is Cys or Trp
  SITE (88)..(88): Xaa is Arg or Gln
  SITE (92)..(92): Xaa is Cys or Trp or Tyr or Val
  SITE (95)..(95): Xaa is His or Leu
  SITE (97)..(97): Xaa is Asp or Glu
  SITE (101)..(101): Xaa is Ile or Phe or Val
  SITE (102)..(102): Xaa is Glu or Val
  SITE (112)..(112): Xaa is Ala or Leu or Phe
  SITE (119)..(119): Xaa is Arg or His
  SITE (132)..(132): Xaa is Met or Val
  SITE (139)..(139): Xaa is Phe or Ser
  SITE (141)..(141): Xaa is His or Ile or Lys
  SITE (145)..(145): Xaa is Ala or Pro
  SITE (150)..(150): Xaa is Arg or Lys
  SITE (170)..(170): Xaa is Gly or Trp
  SITE (172)..(172): Xaa is Gln or Glu
  SITE (173)..(173): Xaa is Arg or Asn or Leu or Lys
  SITE (176)..(176): Xaa is Asn or Asp
  SITE (180)..(180): Xaa is Ile or Val
  SITE (186)..(186): Xaa is Gln or Ile or Tyr
  SITE (192)..(192): Xaa is Asp or Glu
  SITE (196)..(196): Xaa is Asn or Ser
  SITE (199)..(199): Xaa is Gln or His
  SITE (209)..(209): Xaa is Lys or Val
  SITE (210)..(210): Xaa is Ile or Trp or Tyr or Val
  SITE (217)..(217): Xaa is Asp or Thr
  SITE (219)..(219): Xaa is Ala or Pro
  SITE (221)..(221): Xaa is Glu or Ser
  SITE (229)..(229): Xaa is Asn or Glu
  SITE (238)..(238): Xaa is Arg or Asn or Lys
  SITE (245)..(245): Xaa is Asp or Glu
  SITE (249)..(249): Xaa is Ile or Leu
  SITE (251)..(251): Xaa is Ala or Asp or Leu
  SITE (266)..(266): Xaa is Leu or Phe or Val
  SITE (272)..(272): Xaa is Ile or Leu
  SITE (276)..(276): Xaa is Ala or Val
  SITE (277)..(277): Xaa is Ile or Leu
  SITE (278)..(278): Xaa is Ile or Val
  SITE (288)..(288): Xaa is Asn or Gly
  SITE (307)..(307): Xaa is Arg or Lys
  SITE (308)..(308): Xaa is Ala or Ser
  SITE (311)..(311): Xaa is Arg or Lys
  SITE (318)..(318): Xaa is Gln or Glu or Lys
  SITE (319)..(319): Xaa is Glu or Leu
  SITE (323)..(323): Xaa is Asp or Glu or Gly
  SITE (324)..(324): Xaa is Trp or Val
  SITE (327)..(327): Xaa is Ala or Ile
  SITE (345)..(345): Xaa is Arg or Leu or Thr
  SITE (357)..(357): Xaa is Asn or Asp or Glu
  SITE (358)..(358): Xaa is Asn or Asp or His
  SITE (399)..(399): Xaa is Arg or Leu
  SITE (402)..(402): Xaa is Leu or Phe
  SITE (404)..(404): Xaa is Gly or His
  SITE (405)..(405): Xaa is Arg or Val
  SITE (441)..(441): Xaa is Ser or Thr
  SITE (447)..(447): Xaa is Asn or Asp
  SITE (474)..(474): Xaa is Asn or Asp
  SITE (507)..(507): Xaa is Arg or His
  SITE (516)..(516): Xaa is His or Ser
  SITE (526)..(526): Xaa is Ala or Val
  SITE (529)..(529): Xaa is Asn or Gln or Glu
  SITE (535)..(535): Xaa is Thr or Tyr
  SITE (536)..(536): Xaa is Arg or Glu or His
  SITE (537)..(537): Xaa is Lys or Thr or Tyr
  SITE (538)..(538): Xaa is Glu or Thr
  SITE (539)..(539): Xaa is Arg or Glu or Lys
  SITE (543)..(543): Xaa is Gly or Ser
  SITE (560)..(560): Xaa is Gln or Glu
  SITE (562)..(562): Xaa is Phe or Tyr or Val
  SITE (564)..(564): Xaa is Asn or Tyr
  SITE (566)..(566): Xaa is Glu or Ser
  SITE (567)..(567): Xaa is Ala or Asn or Asp or His
  SITE (585)..(585): Xaa is Ile or Leu
  SITE (592)..(592): Xaa is Phe or Tyr
  SITE (594)..(594): Xaa is Arg or Lys
  SITE (595)..(595): Xaa is Asn or Ser
  SITE (596)..(596): Xaa is Gln or Lys
  SITE (597)..(597): Xaa is Ala or Glu or Lys
  SITE (601)..(601): Xaa is Arg or His or Lys
  SITE (610)..(610): Xaa is Lys or Tyr
  SITE (613)..(613): Xaa is Thr or Val
  SITE (614)..(614): Xaa is Ala or Glu
  SITE (617)..(617): Xaa is Ser or Thr
  SITE (622)..(622): Xaa is Ile or Lys
  SITE (629)..(629): Xaa is His or Tyr
  SITE (633)..(633): Xaa is Asp or Glu or His or Lys
  SITE (692)..(692): Xaa is Ala or Gly
  SITE (694)..(694): Xaa is Arg or Gln
  SITE (704)..(704): Xaa is Asp or His
  SITE (710)..(710): Xaa is His or Tyr
  SITE (719)..(719): Xaa is Met or Thr
  SITE (721)..(721): Xaa is Glu or Lys
  SITE (722)..(722): Xaa is Lys or Thr
  SITE (729)..(729): Xaa is Ala or Arg or Gln or His or Lys
  SITE (732)..(732): Xaa is Arg or Lys
  SITE (736)..(736): Xaa is Glu or His
  SITE (742)..(742): Xaa is Gln or Glu or Lys
  SITE (744)..(744): Xaa is Ala or Gly
  SITE (749)..(749): Xaa is Arg or Tyr
  SITE (750)..(750): Xaa is Glu or Ser
  SITE (751)..(751): Xaa is Lys or Thr
  SITE (758)..(758): Xaa is Ala or Cys or Thr
  SITE (759)..(759): Xaa is Glu or Lys or Thr
  SITE (763)..(763): Xaa is Ser or Thr
  SITE (773)..(773): Xaa is Phe or Tyr
  SITE (774)..(774): Xaa is Met or Ser or Thr or Val
  SITE (783)..(783): Xaa is Leu or Met or Trp
  SITE (786)..(786): Xaa is Leu or Met
  SITE (790)..(790): Xaa is Phe or Tyr
MTCVLLKAXXESDXRXXLXQFXRXLXXXXKXYLLRNDILDAFXDYCXDQEXPXXXXXXSXLXKLXXYTQEIIXDXEXLXWIVRPRIAXQEVXRLXVXDLTXXPMTIPELLDXRDRLVNXYHPNEGDVFEIDXQPFYDYXPXIRDXKNIGXGVEFLNRYLSSKLFQDPRQXQXXLFXFLRXHRYNGXQLLINXRIRXPQXLSEQVKQALXXLSDRPPXEXYXEFRFELQXLGFEPGWGXTVARVRXTLEXLXQLLDSPDHQVLEAFXSRIPMXFRIXXXSPHGWFGQEXVLGRPDTGGQVVYILDQVXXLEXQMREDLXXAGLXXLEXQPKIIVLTRLIPNAEGTXCNQRLEKIYGTXXAWILRVPFREFNPKVTQNWISRFEIWPYLETFAIDAERELXAEXGXXPDLIIGNYSDGNLVAFLLARRLKVTQCNIAHALEKXKYLFSXLYWQDLEDKYHFSLQFTADLIAMNAAXFIISSTYQEIVGTPDSIGQYESYQSFTMPDLYXVVNGIELFXPKFNVVPPGXNEXVYFPYXXXXXRLEXDRQRLEELLFTLEDPQXIXGXLXXPEKRPLFSMARLDRIKNXTGLAEAXGXXXXLQEXCNLILVAGXLRXXDSXDREEXAEIEKLXQIIXQYNLHGKIRWLGIRLPKADSGEIYRIIADRQGIFVQPALFEAFGLTILEAMISGLPTFXTXFGGPLEIIQXGVNGFXINPTHLEEXAXXIVRFLEXCDXDPQXWQRISXAXIERVXXXYTWKIHXXRLLXLAKIYGFWNXXSQENREDMXRYXEALXHLLYKPRAQALLAEHLQR

SEQ ID NO: 1231 - protein, 808 aa, Artificial Sequence
  engineered sucrose synthase encoded in plasmid pA35407
MTCVLLKAVVESDERADLRQFSRILQLGEKRYLLRNDILDAFADYCRDQERPVPPPSESRLSKLVFYTQEIIVDNESLCWIVRPRIAQQEVCRLLVEDLTIVPMTIPELLDLRDRLVNHYHPNEGDVFEIDVQPFYDYSPIIRDAKNIGKGVEFLNRYLSSKLFQDPRQWQQNLFNFLRIHRYNGYQLLINERIRSPQHLSEQVKQALVVLSDRPPTEAYSEFRFELQNLGFEPGWGNTVARVRDTLEILDQLLDSPDHQVLEAFVSRIPMLFRIALISPHGWFGQEGVLGRPDTGGQVVYILDQVKSLEKQMREDLELAGLGVLEAQPKIIVLTRLIPNAEGTLCNQRLEKIYGTNDAWILRVPFREFNPKVTQNWISRFEIWPYLETFAIDAERELRAEFGHVPDLIIGNYSDGNLVAFLLARRLKVTQCNIAHALEKSKYLFSNLYWQDLEDKYHFSLQFTADLIAMNAANFIISSTYQEIVGTPDSIGQYESYQSFTMPDLYHVVNGIELFSPKFNVVPPGVNEQVYFPYYHYTERLEGDRQRLEELLFTLEDPQQIYGYLEAPEKRPLFSMARLDRIKNITGLMEAFGRSKALQERCNLIVVAGKLRTADSSDREEIAEIEKMYQIIHQYNLHGKIRLLGIRLPKADSGEIYRIIADRQGIFVQPALFEAFGLTILEAMISGLPTFGTRFGGPLEIIQDGVNGFYINPTHLEEMAETIVRFLEACDRDPQEWQRISKAGIERVYSTYTWKIHCTRLLSLAKIYGFWNFSSQENREDMMRYMEALFHLLYKPRAQALLAEHLQR

SEQ ID NO: 1232 - protein, 808 aa, Artificial Sequence
  engineered sucrose synthase encoded in plasmid pA35408
MTCVLLKAVVESDERADLRQFSRILQLGEKRYLLRNDILDAFADYCRDQERPVPPPSESRLSKLVFYTQEIIVDNESLCWIVRPRIAQQEVCRLLVEDLTIVPMTIPELLDLRDRLVNHYHPNEGDVFEIDVQPFYDYSPIIRDAKNIGKGVEFLNRYLSSKLFQDPRQWQQNLFNFLRIHRYNGYQLLINERIRSPQHLSEQVKQALVVLSDRPPTEAYSEFRFELQNLGFEPGWGNTVARVRDTLEILDQLLDSPDHQVLEAFVSRIPMLFRIALISPHGWFGQEGVLGRPDTGGQVVYILDQVKSLEKQMREDLELAGLGVLEAQPKIIVLTRLIPNAEGTLCNQRLEKIYGTNDAWILRVPFREFNPKVTQNWISRFEIWPYLETFAIDAERELRAEFGHVPDLIIGNYSDGNLVAFLLARRLKVTQCNIAHALEKSKYLFSNLYWQDLEDKYHFSLQFTADLIAMNAANFIISSTYQEIVGTPDSIGQYESYQSFTMPDLYHVVNGIELFSPKFNVVPPGVNEQVYFPYYHYTERLEGDRQRLEELLFTLEDPQQIYGYLEAPEKRPLFSMARADRIKNLTGLMEAFGRSKALQERCNLIIVAGKARTADSSDREEIAEIEKMYQIMHQYNLHGKIRFLGIRLPKADSGEIYRIIADRQGAFAQPALFEAFGLTILEAMISGLPTFGTRFGGPLEIIQDGVNGFYINPTHLEEMAETIVRFLEACDRDPQEWQRISKAGIERVYSTYTWKIHCTRLLSLAKIYGFWNFSSQENREDMMRYMEALFHLLYKPRAQALLAEHLQR

SEQ ID NO: 1233 - protein, 808 aa, Artificial Sequence
  engineered sucrose synthase encoded in plasmid pA35409
MTCVLLKAVVESDERADLRQFSRILQLGEKRYLLRNDILDAFADYCRDQERPVPPPSESRLSKLVFYTQEIIVDNESLCWIVRPRIAQQEVCRLLVEDLTIVPMTIPELLDLRDRLVNHYHPNEGDVFEIDVQPFYDYSPIIRDAKNIGKGVEFLNRYLSSKLFQDPRQWQQNLFNFLRIHRYNGYQLLINERIRSPQHLSEQVKQALVVLSDRPPTEAYSEFRFELQNLGFEPGWGNTVARVRDTLEILDQLLDSPDHQVLEAFVSRIPMLFRIALISPHGWFGQEGVLGRPDTGGQVVYILDQVKSLEKQMREDLELAGLGVLEAQPKIIVLTRLIPNAEGTLCNQRLEKIYGTNDAWILRVPFREFNPKVTQNWISRFEIWPYLETFAIDAERELRAEFGHVPDLIIGNYSDGNLVAFLLARRLKVTQCNIAHALEKSKYLFSNLYWQDLEDKYHFSLQFTADLIAMNAANFIISSTYQEIVGTPDSIGQYESYQSFTMPDLYHVVNGIELFSPKFNVVPPGVNEQVYFPYYHYTERLEGDRQRLEELLFTLEDPQQIYGYLEAPEKRPLFSMARLDRIKNLTGLLEAYGRSKALQERCNLILVAGKLRTADSSDREEIAEIEKLYQLVHQYNLHGKVRWLGIRLPKADSGEIYRIIADRQGIFVQPALFEAFGLTILEAMISGLPTFGTRFGGPLEIIQDGVNGFYINPTHLEEMAETIVRFLEACDRDPQEWQRISKAGIERVYSTYTWKIHCTRLLSLAKIYGFWNFSSQENREDMMRYMEALFHLLYKPRAQALLAEHLQR

SEQ ID NO: 1234 - protein, 808 aa, Artificial Sequence
  engineered sucrose synthase encoded in plasmid pA35410
MTCVLLKAVVESDERADLRQFSRILQLGEKRYLLRNDILDAFADYCRDQERPVPPPSESRLSKLVFYTQEIIVDNESLCWIVRPRIAQQEVCRLLVEDLTIVPMTIPELLDLRDRLVNHYHPNEGDVFEIDVQPFYDYSPIIRDAKNIGKGVEFLNRYLSSKLFQDPRQWQQNLFNFLRIHRYNGYQLLINERIRSPQHLSEQVKQALVVLSDRPPTEAYSEFRFELQNLGFEPGWGNTVARVRDTLEILDQLLDSPDHQVLEAFVSRIPMLFRIALISPHGWFGQEGVLGRPDTGGQVVYILDQVKSLEKQMREDLELAGLGVLEAQPKIIVLTRLIPNAEGTLCNQRLEKIYGTNDAWILRVPFREFNPKVTQNWISRFEIWPYLETFAIDAERELRAEFGHVPDLIIGNYSDGNLVAFLLARRLKVTQCNIAHALEKSKYLFSNLYWQDLEDKYHFSLQFTADLIAMNAANFIISSTYQEIVGTPDSIGQYESYQSFTMPDLYHVVNGIELFSPKFNVVPPGVNEQVYFPYYHYTERLEGDRQRLEELLFTLEDPQQIYGYLEAPEKRPLFSMARLDRIKNLTGLLEVFGRSKALQERCNLIVVAGKLRTADSSDREEIAEIEKLYQILHQYNLHGKVRWLGIRLPKADSGEIYRIIADRQGIFVQPALFEAFGLTILEAMISGLPTWGTRFGGPLEIIQDGVNGFYINPTHLEEMVETWVRWLEACDRDPQEWQRISKAGIERVYSTYTWKIHCTRLLSLAKIYGFWNFSSQENREDMMRYMEALFHLLYKPRAQALLAEHLQR

SEQ ID NO: 1235 - protein, 808 aa, Artificial Sequence
  engineered sucrose synthase encoded in plasmid pA35411
MTCVLLKAVVESDERADLRQFSRILQLGEKRYLLRNDILDAFADYCRDQERPVPPPSESRLSKLVFYTQEIIVDNESLCWIVRPRIAQQEVCRLLVEDLTIVPMTIPELLDLRDRLVNHYHPNEGDVFEIDVQPFYDYSPIIRDAKNIGKGVEFLNRYLSSKLFQDPRQWQQNLFNFLRIHRYNGYQLLINERIRSPQHLSEQVKQALVVLSDRPPTEAYSEFRFELQNLGFEPGWGNTVARVRDTLEILDQLLDSPDHQVLEAFVSRIPMLFRIALISPHGWFGQEGVLGRPDTGGQVVYILDQVKSLEKQMREDLELAGLGVLEAQPKIIVLTRLIPNAEGTLCNQRLEKIYGTNDAWILRVPFREFNPKVTQNWISRFEIWPYLETFAIDAERELRAEFGHVPDLIIGNYSDGNLVAFLLARRLKVTQCNIAHALEKSKYLFSNLYWQDLEDKYHFSLQFTADLIAMNAANFIISSTYQEIVGTPDSIGQYESYQSFTMPDLYHVVNGIELFSPKFNVVPPGVNEQVYFPYYHYTERLEGDRQRLEELLFTLEDPQQIYGYLEAPEKRPLFSMLRLDRIKNLTGLWEVWGRSKALQERCNLIVVAGKLRTADSSDREEIAEIEKLYQILHQYNLHGKLRWLGIRLPKADSGEIYRIIADRQGIFIQPALFEAFGLTILEAMISGLPTWGTRFGGPLEIIQDGVNGFYINPTHLEEMVETWVRWLEACDRDPQEWQRISKAGIERVYSTYTWKIHCTRLLSLAKIYGFWNFSSQENREDMMRYMEALFHLLYKPRAQALLAEHLQR

SEQ ID NO: 1236 - protein, 808 aa, Artificial Sequence
  engineered sucrose synthase encoded in plasmid pA35412
MTCVLLKAVVESDERADLRQFSRILQLGEKRYLLRNDILDAFADYCRDQERPVPPPSESRLSKLVFYTQEIIVDNESLCWIVRPRIAQQEVCRLLVEDLTIVPMTIPELLDLRDRLVNHYHPNEGDVFEIDVQPFYDYSPIIRDAKNIGKGVEFLNRYLSSKLFQDPRQWQQNLFNFLRIHRYNGYQLLINERIRSPQHLSEQVKQALVVLSDRPPTEAYSEFRFELQNLGFEPGWGNTVARVRDTLEILDQLLDSPDHQVLEAFVSRIPMLFRIALISPHGWFGQEGVLGRPDTGGQVVYILDQVKSLEKQMREDLELAGLGVLEAQPKIIVLTRLIPNAEGTLCNQRLEKIYGTNDAWILRVPFREFNPKVTQNWISRFEIWPYLETFAIDAERELRAEFGHVPDLIIGNYSDGNLVAFLLARRLKVTQCNIAHALEKSKYLFSNLYWQDLEDKYHFSLQFTADLIAMNAANFIISSTYQEIVGTPDSIGQYESYQSFTMPDLYHVVNGIELFSPKFNVVPPGVNEQVYFPYYHYTERLEGDRQRLEELLFTLEDPQQIYGYIEAPEKRMLFSMARLDRIKNLTGLAEAFGRSKALQERCNLVLVAGKLRTADSSDREEIAEIEKLYQIIHQYNLHGKIRWLGIRLPKADSGEIYRVVADRQGIFVQPALFEAFGLTILEAMISGLPTFGTRFGGPLEIIQDGVNGFYINPTHLEEMAETIVRFLEACDRDPQEWQRISKAGIERVYSTYTWKIHCTRLLSLAKIYGFWNFSSQENREDMMRYMEALFHLLYKPRAQALLAEHLQR

SEQ ID NO: 1237 - protein, 808 aa, Artificial Sequence
  engineered sucrose synthase encoded in plasmid pA35413
MTCVLLKAVVESDERADLRQFSRILQLGEKRYLLRNDILDAFADYCRDQERPVPPPSESRLSKLVFYTQEIIVDNESLCWIVRPRIAQQEVCRLLVEDLTIVPMTIPELLDLRDRLVNHYHPNEGDVFEIDVQPFYDYSPIIRDAKNIGKGVEFLNRYLSSKLFQDPRQWQQNLFNFLRIHRYNGYQLLINERIRSPQHLSEQVKQALVVLSDRPPTEAYSEFRFELQNLGFEPGWGNTVARVRDTLEILDQLLDSPDHQVLEAFVSRIPMLFRIALISPHGWFGQEGVLGRPDTGGQVVYILDQVKSLEKQMREDLELAGLGVLEAQPKIIVLTRLIPNAEGTLCNQRLEKIYGTNDAWILRVPFREFNPKVTQNWISRFEIWPYLETFAIDAERELRAEFGHVPDLIIGNYSDGNLVAFLLARRLKVTQCNIAHALEKSKYLFSNLYWQDLEDKYHFSLQFTADLIAMNAANFIISSTYQEIVGTPDSIGQYESYQSFTMPDLYHVVNGIELFSPKFNVVPPGVNEQVYFPYYHYTERLEGDRQRIEELLFTLEDPQQIYGYIEAPEKRWLISMARLDRIKNLTGLAEAFGRSKALQERCNLLLIAGKLRTADSSDREEIAEIEKLYQIIHQYNLHGKIRWLGIRLPKADSGEWYRWVADRQGIWVQPALFEAFGLTILEVMISGLPTFGTRFGGPLEIIQDGVNGFYINPTHLEEMAETIVRFLEACDRDPQEWQRISKAGIERVYSTYTWKIHCTRLLSLAKIYGFWNFSSQENREDMMRYMEALFHLLYKPRAQALLAEHLQR

SEQ ID NO: 1238 - protein, 808 aa, Artificial Sequence
  engineered sucrose synthase encoded in plasmid pA35414
MTCVLLKAVVESDERADLRQFSRILQLGEKRYLLRNDILDAFADYCRDQERPVPPPSESRLSKLVFYTQEIIVDNESLCWIVRPRIAQQEVCRLLVEDLTIVPMTIPELLDLRDRLVNHYHPNEGDVFEIDVQPFYDYSPIIRDAKNIGKGVEFLNRYLSSKLFQDPRQWQQNLFNFLRIHRYNGYQLLINERIRSPQHLSEQVKQALVVLSDRPPTEAYSEFRFELQNLGFEPGWGNTVARVRDTLEILDQLLDSPDHQVLEAFVSRIPMLFRIALISPHGWFGQEGVLGRPDTGGQVVYILDQVKSLEKQMREDLELAGLGVLEAQPKIIVLTRLIPNAEGTLCNQRLEKIYGTNDAWILRVPFREFNPKVTQNWISRFEIWPYLETFAIDAERELRAEFGHVPDLIIGNYSDGNLVAFLLARRLKVTQCNIAHALEKSKYLFSNLYWQDLEDKYHFSLQFTADLIAMNAANFIISSTYQEIVGTPDSIGQYESYQSFTMPDLYHVVNGIELFSPKFNVVPPGVNEQVYFPYYHYTERLEGDRQRLEEVLFTLEDPQQIYGYIEAPEKRWLISMARLDRIKNLTGLAEAFGRSKALQERCNLLLIAGKLRTADSSDREEIAEIEKLYQIIHQYNLHGKIRWLGIRLPKADSGEWYRLVADRQGIWVQPALFEAFGLTILEVMISGLPTFGTRFGGPLEIIQDGVNGFYINPTHLEEMAETIVRFLEACDRDPQEWQRISKAGIERVYSTYTWKIHCTRLLSLAKIYGFWNFSSQENREDMMRYMEALFHLLYKPRAQALLAEHLQR

SEQ ID NO: 1239 - protein, 808 aa, Artificial Sequence
  engineered sucrose synthase encoded in plasmid pA35415
MTCVLLKAVVESDERADLRQFSRILQLGEKRYLLRNDILDAFADYCRDQERPVPPPSESRLSKLVFYTQEIIVDNESLCWIVRPRIAQQEVCRLLVEDLTIVPMTIPELLDLRDRLVNHYHPNEGDVFEIDVQPFYDYSPIIRDAKNIGKGVEFLNRYLSSKLFQDPRQWQQNLFNFLRIHRYNGYQLLINERIRSPQHLSEQVKQALVVLSDRPPTEAYSEFRFELQNLGFEPGWGNTVARVRDTLEILDQLLDSPDHQVLEAFVSRIPMLFRIALISPHGWFGQEGVLGRPDTGGQVVYILDQVKSLEKQMREDLELAGLGVLEAQPKIIVLTRLIPNAEGTLCNQRLEKIYGTNDAWILRVPFREFNPKVTQNWISRFEIWPYLETFAIDAERELRAEFGHVPDLIIGNYSDGNLVAFLLARRLKVTQCNIAHALEKSKYLFSNLYWQDLEDKYHFSLQFTADLIAMNAANFIISSTYQEIVGTPDSIGQYESYQSFTMPDLYHVVNGIELFSPKFNVVPPGVNEQVYFPYYHYTERLEGDRQRLEELWFTLEDPQQIYGYLEAPEKRLLLSMARLDRIKNLTGLAEAFGRSKALQERCNLILIAGKLRTADSSDREEIAEIEKLYQIIHQYNLHGKIRWLGIRLPKADSGEIYRLIADRQGIWVQPALFEAFGLTILEVMISGLPTFGTRFGGPLEIIQDGVNGFYINPTHLEEMAETIVRFLEACDRDPQEWQRISKAGIERVYSTYTWKIHCTRLLSLAKIYGFWNFSSQENREDMMRYMEALFHLLYKPRAQALLAEHLQR

SEQ ID NO: 1240 - protein, 808 aa, Artificial Sequence
  engineered sucrose synthase encoded in plasmid pA35416
MTCVLLKAVVESDERADLRQFSRILQLGEKRYLLRNDILDAFADYCRDQERPVPPPSESRLSKLVFYTQEIIVDNESLCWIVRPRIAQQEVCRLLVEDLTIVPMTIPELLDLRDRLVNHYHPNEGDVFEIDVQPFYDYSPIIRDAKNIGKGVEFLNRYLSSKAFQDPRQWQQNFLNFMRIHRYNGYQLGVNERIRSPQHLMEQIKQALVVLSDRPPTEAFSEFRFELQNLGFEPGLGNTVARVRDTLELMAQAADSPDHQVLEALVSRIPMLFRIALISPHGWFGQEGVLGRPDTGGQVVYILDQVKSLEKQMREDLELAGLGVLEAQPKIIVLTRLIPNAEGTLCNQRLEKIYGTNDAWILRVPFREFNPKVTQNWISRFEIWPYLETFAIDAERELRAEFGHVPDLIIGNYSDGNLVAFLLARRLKVTQCNIAHALEKSKYLFSNLYWQDLEDKYHFSLQFTADLIAMNAANFIISSTYQEIVGTPDSIGQYESYQSFTMPDLYHVVNGIELFSPKFNVVPPGVNEQVYFPYYHYTERLEGDRQRLEELLFTLEDPQQIYGYLEAPEKRPLFSMARLDRIKNLTGLAEAFGRSKALQERCNLILVAGKLRTADSSDREEIAEIEKLYQIIHQYNLHGKIRWLGIRLPKADSGEIYRIIADRQGIFVQPALFEAFGLTILEAMISGLPTFGTRFGGPLEIIQDGVNGFYINPTHLEEMAETIVRFLEACDRDPQEWQRISKAGIERVYSTYTWKIHCTRLLSLAKIYGFWNFSSQENREDMMRYMEALFHLLYKPRAQALLAEHLQR

SEQ ID NO: 1241 - protein, 808 aa, Artificial Sequence
  engineered sucrose synthase encoded in plasmid pA35417
MTCVLLKAVVESDERADLRQFSRILQLGEKRYLLRNDILDAFADYCRDQERPVPPPSESRLSKLVFYTQEIIVDNESLCWIVRPRIAQQEVCRLLVEDLTIVPMTIPELLDLRDRLVNHYHPNEGDVFEIDVQPFYDYSPIIRDAKNIGKGVEFLNRYLSSKLFQDPRQWQQNLFNFLRIHRYNGYQLLINERIRSPQHLAEQIKQALVVLSDRPPTEAYSEFRFELQNLGFEPGLGNTVARVRDTLEIILQVLDSPDHQVLEALVSRIPMLFRIALISPHGWFGQEGVLGRPDTGGQVVYILDQVKSLEKQMREDLELAGLGVLEAQPKIIVLTRLIPNAEGTLCNQRLEKIYGTNDAWILRVPFREFNPKVTQNWISRFEIWPYLETFAIDAERELRAEFGHVPDLIIGNYSDGNLVAFLLARRLKVTQCNIAHALEKSKYLFSNLYWQDLEDKYHFSLQFTADLIAMNAANFIISSTYQEIVGTPDSIGQYESYQSFTMPDLYHVVNGIELFSPKFNVVPPGVNEQVYFPYYHYTERLEGDRQRLEELLFTLEDPQQIYGYLEAPEKRPLFSMARLDRIKNLTGLAEAFGRSKALQERCNLILVAGKLRTADSSDREEIAEIEKLYQIIHQYNLHGKIRWLGIRLPKADSGEIYRIIADRQGIFVQPALFEAFGLTILEAMISGLPTFGTRFGGPLEIIQDGVNGFYINPTHLEEMAETIVRFLEACDRDPQEWQRISKAGIERVYSTYTWKIHCTRLLSLAKIYGFWNFSSQENREDMMRYMEALFHLLYKPRAQALLAEHLQR

SEQ ID NO: 1242 - protein, 808 aa, Artificial Sequence
  engineered sucrose synthase encoded in plasmid pA35418
MTCVLLKAVVESDERADLRQFSRILQLGEKRYLLRNDILDAFADYCRDQERPVPPPSESRLSKLVFYTQEIIVDNESLCWIVRPRIAQQEVCRLLVEDLTIVPMTIPELLDLRDRLVNHYHPNEGDVFEIDVQPFYDYSPIIRDAKNIGKGVEFLNRYLSSKWFQDPRQWQQNWLNWWRIHRYNGYQLWINERIRSPQHLVEQIKQLLVVLSDRPPTEAWSEVRFEIQNLGWEPGLGNTVARIRDTLEIILQLIDSPDHQVLEALVSRIPMLFRIALISPHGWFGQEGVLGRPDTGGQVVYILDQVKSLEKQMREDLELAGLGVLEAQPKIIVLTRLIPNAEGTLCNQRLEKIYGTNDAWILRVPFREFNPKVTQNWISRFEIWPYLETFAIDAERELRAEFGHVPDLIIGNYSDGNLVAFLLARRLKVTQCNIAHALEKSKYLFSNLYWQDLEDKYHFSLQFTADLIAMNAANFIISSTYQEIVGTPDSIGQYESYQSFTMPDLYHVVNGIELFSPKFNVVPPGVNEQVYFPYYHYTERLEGDRQRLEELLFTLEDPQQIYGYLEAPEKRPLFSMARLDRIKNLTGLAEAFGRSKALQERCNLILVAGKLRTADSSDREEIAEIEKLYQIIHQYNLHGKIRWLGIRLPKADSGEIYRIIADRQGIFVQPALFEAFGLTILEAMISGLPTFGTRFGGPLEIIQDGVNGFYINPTHLEEMAETIVRFLEACDRDPQEWQRISKAGIERVYSTYTWKIHCTRLLSLAKIYGLWNFSSQENREDMMRYMEALFHLLYKPRAQALLAEHLQR

SEQ ID NO: 1243 - protein, 808 aa, Artificial Sequence
  engineered sucrose synthase encoded in plasmid pA35419
MTCVLLKAVVESDERADLRQFSRILQLGEKRYLLRNDILDAFADYCRDQERPVPPPSESRLSKLVFYTQEIIVDNESLCWIVRPRIAQQEVCRLLVEDLTIVPMTIPELLDLRDRLVNHYHPNEGDVFEIDVQPFYDYSPIIRDAKNIGKGVEFLNRYISSKLFQDPRQWQQNLINWLRIHRYNGYQLLWNERIRSPQHLLEQIKQLLVVLSDRPPTEAWSEIRFELQNLGWEPGLGNTVARVRDTLEIWLQLLDSPDHQVWEAWVSRIPMLFRIALISPHGWFGQEGVLGRPDTGGQVVYILDQVKSLEKQMREDLELAGLGVLEAQPKIIVLTRLIPNAEGTLCNQRLEKIYGTNDAWILRVPFREFNPKVTQNWISRFEIWPYLETFAIDAERELRAEFGHVPDLIIGNYSDGNLVAFLLARRLKVTQCNIAHALEKSKYLFSNLYWQDLEDKYHFSLQFTADLIAMNAANFIISSTYQEIVGTPDSIGQYESYQSFTMPDLYHVVNGIELFSPKFNVVPPGVNEQVYFPYYHYTERLEGDRQRLEELLFTLEDPQQIYGYLEAPEKRPLFSMARLDRIKNLTGLAEAFGRSKALQERCNLILVAGKLRTADSSDREEIAEIEKLYQIIHQYNLHGKIRWLGIRLPKADSGEIYRIIADRQGIFVQPALFEAFGLTILEAMISGLPTFGTRFGGPLEIIQDGVNGFYINPTHLEEMAETIVRFLEACDRDPQEWQRISKAGIERVYSTYTWKIHCTRLLSLAKIYGLWNFSSQENREDMMRYMEALFHLLYKPRAQALLAEHLQR

SEQ ID NO: 1244 - protein, 808 aa, Artificial Sequence
  engineered sucrose synthase encoded in plasmid pA35420
MTCVLLKAVVESDERADLRQFSRILQLGEKRYLLRNDILDAFADYCRDQERPVPPPSESRLSKLVFYTQEIIVDNESLCWIVRPRIAQQEVCRLLVEDLTIVPMTIPELLDLRDRLVNHYHPNEGDVFEIDVQPFYDYSPIIRDAKNIGKGVEFLNRYISSKLFQDPRQWQQNLINWLRIHRYNGYQLWWNERIRSPQHLLEQIKQVLVVLSDRPPTEAWSEIRFEWQNLGWEPGWGNTVARVRDTLEILLQLLDSPDHQVWEAWVSRVPMLFRIALISPHGWFGQEGVLGRPDTGGQVVYILDQVKSLEKQMREDLELAGLGVLEAQPKIIVLTRLIPNAEGTLCNQRLEKIYGTNDAWILRVPFREFNPKVTQNWISRFEIWPYLETFAIDAERELRAEFGHVPDLIIGNYSDGNLVAFLLARRLKVTQCNIAHALEKSKYLFSNLYWQDLEDKYHFSLQFTADLIAMNAANFIISSTYQEIVGTPDSIGQYESYQSFTMPDLYHVVNGIELFSPKFNVVPPGVNEQVYFPYYHYTERLEGDRQRLEELLFTLEDPQQIYGYLEAPEKRPLFSMARLDRIKNLTGLAEAFGRSKALQERCNLILVAGKLRTADSSDREEIAEIEKLYQIIHQYNLHGKIRWLGIRLPKADSGEIYRIIADRQGIFVQPALFEAFGLTILEAMISGLPTFGTRFGGPLEIIQDGVNGFYINPTHLEEMAETIVRFLEACDRDPQEWQRISKAGIERVYSTYTWKIHCTRLLSLAKIYGWWNFSSQENREDMMRYMEALFHLLYKPRAQALLAEHLQR

SEQ ID NO: 1245 - protein, 808 aa, Artificial Sequence
  engineered sucrose synthase encoded in plasmid pA35421
MTCVLLKAVVESDERADLRQFSRILQLGEKRYLLRNDILDAFADYCRDQERPVPPPSESRLSKLVFYTQEIIVDNESLCWIVRPRIAQQEVCRLLVEDLTIVPMTIPELLDLRDRLVNHYHPNEGDVFEIDVQPFYDYSPIIRDAKNIGKGVEFLNRYLSSKLFQDPRQWQQNLFNFLRIHRYNGYQLLINERIRSPQHLSEQVKQALVVLSDRPPTEAYSEFRFELQNLGFEPGWGNTVARVRDTLEILDQLLDSPDHQVLEAFVSRIPMLFRIALISPHGWFGQEGVLGRPDTGGQVVYILDQVKSLEKQMREDLELAGLGVLEAQPKIIVLTRLIPNAEGTLCNQRLEKIYGTNDAWILRVPFREFNPKVTQNWISRFEIWPYLETFAIDAERELRAEFGHVPDLIIGNYSDGNLVAFLLARRLKVTQANIAHALEKSKYLFSNLYWQDLEDKYHFSLQFTADLIAMNAANFIISSTYQEIVGTPDSIGQYESYQSFTMPDLYHVVNGIELFSPKFNVGPPGVNEQVYFPYYHYTERLEGDRQRLEELLFTLEDPQQIYGYLEAPEKRPLFSMARLDRIKNLTGLAEAFGRSKALQERCNLILVAGKLRTADSSDREEIAEIEKLYQIIHQYNLHGKIRWLGIRLPKADSGEIYRIIADRQGIFVQPALFEAFGLTILEAMISGLPTFGTRFGGPLEIIQDGVNGFYINPTHLEEMAETIVRFLEACDRDPQEWQRISKAGIERVYSTYTWKIVCTRILSWAKIYGFWNFSSQENREDMMRYMEALFHLLYKPRAQALLAEHLQR

SEQ ID NO: 1246 - protein, 808 aa, Artificial Sequence
  engineered sucrose synthase encoded in plasmid pA35422
MTCVLLKAVVESDERADLRQFSRILQLGEKRYLLRNDILDAFADYCRDQERPVPPPSESRLSKLVFYTQEIIVDNESLCWIVRPRIAQQEVCRLLVEDLTIVPMTIPELLDLRDRLVNHYHPNEGDVFEIDVQPFYDYSPIIRDAKNIGKGVEFLNRYLSSKLFQDPRQWQQNLFNFLRIHRYNGYQLLINERIRSPQHLSEQVKQALVVLSDRPPTEAYSEFRFELQNLGFEPGWGNTVARVRDTLEILDQLLDSPDHQVLEAFVSRIPMLFRIALISPHGWFGQEGVLGRPDTGGQVVLILDQVKSLEKQMREDLELAGLGVLEAQPKIIVLTRLIPNAEGTLCNQRLEKIYGTNDAWILRVPFREFNPKVTQNWISRFEIWPYLETFAIDAERELRAEFGHVPDVIIGNYSDGNLVAFLLARRLKVTQINIAHALEKSKYLFSNLYWQDLEDKYHFSLQFTADLIAMNAANAIISSTYQEIVGTPDSIGQYESYQSFTMPDLYHVVNGIELFSPKFNVVPPGVNEQVYFPYYHYTERLEGDRQRLEELLFTLEDPQQIYGYLEAPEKRPLFSMARLDRIKNLTGLAEAFGRSKALQERCNLILVAGKLRTADSSDREEIAEIEKLYQIIHQYNLHGKIRWLGIRLPKADSGEIYRIIADRQGIFVQPALFEAFGLTILEAMISGLPTFGTRFGGPLEIIQDGVNGFYINPTHLEEMAETIVRFLEACDRDPQEWQRISKAGIERVYSTYTWKIFCTRILSLAKIYGFWNFSSQENREDMMRYMEALFHLLYKPRAQALLAEHLQR

SEQ ID NO: 1247 - protein, 808 aa, Artificial Sequence
  engineered sucrose synthase encoded in plasmid pA35423
MTCVLLKAVVESDERADLRQFSRILQLGEKRYLLRNDILDAFADYCRDQERPVPPPSESRLSKLVFYTQEIIVDNESLCWIVRPRIAQQEVCRLLVEDLTIVPMTIPELLDLRDRLVNHYHPNEGDVFEIDVQPFYDYSPIIRDAKNIGKGVEFLNRYLSSKLFQDPRQWQQNLFNFLRIHRYNGYQLLINERIRSPQHLSEQVKQALVVLSDRPPTEAYSEFRFELQNLGFEPGWGNTVARVRDTLEILDQLLDSPDHQVLEAFVSRIPMLFRIAIISPHGWFGQEGVLGRPDTGGQVVWILDQVKSLEKQIREDLELAGLGVLEAQPKIIILTRLIPNAEGTLCNQRLEKIYGTNDAWILRVPFREFNPKVTQNWISRFEIWPYLETFAIDAERELRAEFGHVPDLIIGNYSDGNLVAFLLARRLKVTQVNIAHALEKSKYLFSNLYWQDLEDKYHFSLQFTADLIAMNAANFIISSTYQEIVGTPDSIGQYESYQSFTMPDLYHVVNGIELFSPKFNVIPPGVNEQVYFPYYHYTERLEGDRQRLEELLFTLEDPQQIYGYLEAPEKRPLFSMARLDRIKNLTGLAEAFGRSKALQERCNLILVAGKLRTADSSDREEIAEIEKLYQIIHQYNLHGKIRWLGIRLPKADSGEIYRIIADRQGIFVQPALFEAFGLTILEAMISGLPTFGTRFGGPLEIIQDGVNGFYINPTHLEEMAETIVRFLEACDRDPQEWQRISKAGIERVYSTYTWKIWCTRWLSLVKIYGFWNFSSQENREDMMRYMEALFHLLYKPRAQALLAEHLQR

SEQ ID NO: 1248 - protein, 808 aa, Artificial Sequence
  engineered sucrose synthase encoded in plasmid pA35424
MTCVLLKAVVESDERADLRQFSRILQLGEKRYLLRNDILDAFADYCRDQERPVPPPSESRLSKLVFYTQEIIVDNESLCWIVRPRIAQQEVCRLLVEDLTIVPMTIPELLDLRDRLVNHYHPNEGDVFEIDVQPFYDYSPIIRDAKNIGKGVEFLNRYLSSKLFQDPRQWQQNLFNFLRIHRYNGYQLLINERIRSPQHLSEQVKQALVVLSDRPPTEAYSEFRFELQNLGFEPGWGNTVARVRDTLEILDQLLDSPDHQVLEAFVSRIPMLFRIAIISPHGWFGQEGVLGRPDTGGQVVWILDQVKSLEKQMREDLELAGLGVLEAQPKIIILTRLIPNAEGTLCNQRLEKIYGTNDAWILRVPFREFNPKVTQNWISRFEIWPYLETFAIDAERELRAEFGHVPDLIIGNYSDGNLVAFLLARRLKVTQLNMAHALEKSKYLFSNLYWQDLEDKYHFSLQFTADLIAMNAANFIISSTYQEIVGTPDSIGQYESYQSFTMPDLYHVVNGIELFSPKFNVIPPGVNEQVYFPYYHYTERLEGDRQRLEELLFTLEDPQQIYGYLEAPEKRPLFSMARLDRIKNLTGLAEAFGRSKALQERCNLILVAGKLRTADSSDREEIAEIEKLYQIIHQYNLHGKIRWLGIRLPKADSGEIYRIIADRQGIFVQPALFEAFGLTILEAMISGLPTFGTRFGGPLEIIQDGVNGFYINPTHLEEMAETIVRFLEACDRDPQEWQRISKAGIERVYSTYTWKIFCTRLLSLVKIYGFWNFSSQENREDMMRYMEALFHLLYKPRAQALLAEHLQR

SEQ ID NO: 1249 - protein, 808 aa, Artificial Sequence
  engineered sucrose synthase encoded in plasmid pA35425
MTCVLLKAVVESDERADLRQFSRILQLGEKRYLLRNDILDAFADYCRDQERPVPPPSESRLSKLVFYTQEIIVDNESLCWIVRPRIAQQEVCRLLVEDLTIVPMTIPELLDLRDRLVNHYHPNEGDVFEIDVQPFYDYSPIIRDAKNIGKGVEFLNRYLSSKLFQDPRQWQQNLFNFLRIHRYNGYQLLINERIRSPQHLSEQVKQALVVLSDRPPTEAYSEFRFELQNLGFEPGWGNTVARVRDTLEILDQLLDSPDHQVLEAFVSRIPMLFRIAIISPHGWFGQEGVLGRPDTGGQVVIILDQVKSLEKQIREDLELAGLGVLEAQPKIIILTRLIPNAEGTLCNQRLEKIYGTNDAWILRVPFREFNPKVTQNWISRFEIWPYLETFAIDAERELRAEFGHVPDLIIGNYSDGNLVAFLLARRLKVTQLNMAHALEKSKYLFSNLYWQDLEDKYHFSLQFTADLIAMNAANFIISSTYQEIVGTPDSIGQYESYQSFTMPDLYHVVNGIELFSPKFNVIPPGVNEQVYFPYYHYTERLEGDRQRLEELLFTLEDPQQIYGYLEAPEKRPLFSMARLDRIKNLTGLAEAFGRSKALQERCNLILVAGKLRTADSSDREEIAEIEKLYQIIHQYNLHGKIRWLGIRLPKADSGEIYRIIADRQGIFVQPALFEAFGLTILEAMISGLPTFGTRFGGPLEIIQDGVNGFYINPTHLEEMAETIVRFLEACDRDPQEWQRISKAGIERVYSTYTWKIWCTRILSLIKIYGFWNFSSQENREDMMRYMEALFHLLYKPRAQALLAEHLQR

SEQ ID NO: 1250 - protein, 808 aa, Artificial Sequence
  engineered sucrose synthase encoded in plasmid pA35426
MTCVLLKAVVESDERADLRQFSRILQLGEKRYLLRNDILDAFADYCRDQERPVPPPSESRLSKLVFYTQEIIVDNESLCWIVRPRIAQQEVCRLLVEDLTIVPMTIPELLDLRDRLVNHYHPNEGDVFEIDVQPFYDYSPIIRDAKNIGKGVEFLNRYLSSKLFQDPRQWQQNLFNFLRIHRYNGYQLLINERIRSPQHLSEQVKQALVVLSDRPPTEAYSEFRFELQNLGFEPGWGNTVARVRDTLEILDQLLDSPDHQVLEAFVSRIPMLFRILLISAHGWFGQEGVLGRPDTGGQVVYILDQVKSLEKQMREDLELAGLGVLEAQPKIVVATRLIPNAEGTLCNQRLEKIYGTNDAWILRVPFREFNPKVTQNWISRFEIWPYLETFAIDLEREARAEFGHVPDLIIGNYSDGNLVAFLLARRLKVTQCNIAHALEKSKYLFSNLYWQDLEDKYHFSLQFTADLIAMNAANFIISSTYQEIVGTPDSIGQYESYQSFTMPDLYHVVNGIELFSPKFNVVPPGVNEQVYFPYYHYTERLEGDRQRLEELLFTLEDPQQIYGYLEAPEKRPLFSMARLDRIKNLTGLAEAFGRSKALQERCNLILVAGKLRTADSSDREEIAEIEKLYQIIHQYNLHGKIRWLGIRLPKADSGEIYRIIADRQGIFVQPALFEAFGLTILEAMISGLPTFGTRFGGPLEIIQDGVNGFYINPTHLEEMAETIVRFLEACDRDPQEWQRISKAGIERVYSTYTWKIHCTRLLSLAKIYGFWNFSSQENREDMMRYMEALFHLLYKPRAQALLAEHLQR

SEQ ID NO: 1251 - protein, 808 aa, Artificial Sequence
  engineered sucrose synthase encoded in plasmid pA35427
MTCVLLKAVVESDERADLRQFSRILQLGEKRYLLRNDILDAFADYCRDQERPVPPPSESRLSKLVFYTQEIIVDNESLCWIVRPRIAQQEVCRLLVEDLTIVPMTIPELLDLRDRLVNHYHPNEGDVFEIDVQPFYDYSPIIRDAKNIGKGVEFLNRYLSSKLFQDPRQWQQNLFNFLRIHRYNGYQLLINERIRSPQHLSEQVKQALVVLSDRPPTEAYSEFRFELQNLGFEPGWGNTVARVRDTLEILDQLLDSPDHQVLEAFVSRIPMLFRILLISAHGWFGQEGVLGRPDTGGQVVYILDQVKSLEKQMREDLELAGLGVLEAQPKIIVLTRLIPNAEGTLCNQRLEKIYGTNDAWILRVPFREFNPKVTQNWISRFEIWPYLETFAIDAEREVRAEMGHVPDLIIGNYSDGNLVAFLLARRLKVTQCNIAHALEKSKYLFSNLYWQDLEDKYHFSLQFTADLIAMNAANFIISSTYQEIVGTPDSIGQYESYQSFTMPDLYHVVNGIELFSPKFNVVPPGVNEQVYFPYYHYTERLEGDRQRLEELLFTLEDPQQIYGYLEAPEKRPLFSMARLDRIKNLTGLAEAFGRSKALQERCNLILVAGKLRTADSSDREEIAEIEKLYQIIHQYNLHGKIRWLGIRLPKADSGEIYRIIADRQGIFVQPALFEAFGLTILEAMISGLPTFGTRFGGPLEIIQDGVNGFYINPTHLEEMAETIVRFLEACDRDPQEWQRISKAGIERVYSTYTWKIHCTRLLSLAKIYGFWNFSSQENREDMMRYMEALFHLLYKPRAQALLAEHLQR

SEQ ID NO: 1252 - protein, 808 aa, Artificial Sequence
  engineered sucrose synthase encoded in plasmid pA35428
MTCVLLKAVVESDERADLRQFSRILQLGEKRYLLRNDILDAFADYCRDQERPVPPPSESRLSKLVFYTQEIIVDNESLCWIVRPRIAQQEVCRLLVEDLTIVPMTIPELLDLRDRLVNHYHPNEGDVFEIDVQPFYDYSPIIRDAKNIGKGVEFLNRYLSSKLFQDPRQWQQNLFNFLRIHRYNGYQLLINERIRSPQHLSEQVKQALVVLSDRPPTEAYSEFRFELQNLGFEPGWGNTVARVRDTLEILDQLLDSPDHQVLEAFVSRIPMLFRIALISMHGWFGQEGVLGRPDTGGQVVYILDQVKSLEKQMREDLELAGLGVLEAQPKIIVITRLIPNAEGTLCNQRLEKIYGTNDAWILRVPFREFNPKVTQNWISRFEIWPYLETAAIDIEREVRAELGHVPDLIIGNYSDGNLVAFLLARRLKVTQCNIAHALEKSKYLFSNLYWQDLEDKYHFSLQFTADLIAMNAANFIISSTYQEIVGTPDSIGQYESYQSFTMPDLYHVVNGIELFSPKFNVVPPGVNEQVYFPYYHYTERLEGDRQRLEELLFTLEDPQQIYGYLEAPEKRPLFSMARLDRIKNLTGLAEAFGRSKALQERCNLILVAGKLRTADSSDREEIAEIEKLYQIIHQYNLHGKIRWLGIRLPKADSGEIYRIIADRQGIFVQPALFEAFGLTILEAMISGLPTFGTRFGGPLEIIQDGVNGFYINPTHLEEMAETIVRFLEACDRDPQEWQRISKAGIERVYSTYTWKIHCTRLLSLAKIYGFWNFSSQENREDMMRYMEALFHLLYKPRAQALLAEHLQR

SEQ ID NO: 1253 - protein, 808 aa, Artificial Sequence
  engineered sucrose synthase encoded in plasmid pA35429
MTCVLLKAVVESDERADLRQFSRILQLGEKRYLLRNDILDAFADYCRDQERPVPPPSESRLSKLVFYTQEIIVDNESLCWIVRPRIAQQEVCRLLVEDLTIVPMTIPELLDLRDRLVNHYHPNEGDVFEIDVQPFYDYSPIIRDAKNIGKGVEFLNRYLSSKLFQDPRQWQQNLFNFLRIHRYNGYQLLINERIRSPQHLSEQVKQALVVLSDRPPTEAYSEFRFELQNLGFEPGWGNTVARVRDTLEILDQLLDSPDHQVLEAFVSRIPMLFRIVLISIHGWFGQEGVLGRPDTGGQVVYILDQVKSLEKQMREDLELAGLGVLEAQPKIIVLTRLIPNAEGTLCNQRLEKIYGTNDAWILRIPFREFNPKVTQNWISRFEIWPYLETWVIDVEREVRAELGHVPDLIIGNYSDGNLVAFLLARRWKITQCNIAHALEKSKYLFSNLYWQDLEDKYHFSLQFTADLIAMNAANFIISSTYQEIVGTPDSIGQYESYQSFTMPDLYHVVNGIELFSPKFNVVPPGVNEQVYFPYYHYTERLEGDRQRLEELLFTLEDPQQIYGYLEAPEKRPLFSMARLDRIKNLTGLAEAFGRSKALQERCNLILVAGKLRTADSSDREEIAEIEKLYQIIHQYNLHGKIRWLGIRLPKADSGEIYRIIADRQGIFVQPALFEAFGLTILEAMISGLPTFGTRFGGPLEIIQDGVNGFYINPTHLEEMAETIVRFLEACDRDPQEWQRISKAGIERVYSTYTWKIHCTRLLSLAKIYGFWNFSSQENREDMMRYMEALFHLLYKPRAQALLAEHLQR

SEQ ID NO: 1254 - protein, 808 aa, Artificial Sequence
  engineered sucrose synthase encoded in plasmid pA35430
MTCVLLKAVVESDERADLRQFSRILQLGEKRYLLRNDILDAFADYCRDQERPVPPPSESRLSKLVFYTQEIIVDNESLCWIVRPRIAQQEVCRLLVEDLTIVPMTIPELLDLRDRLVNHYHPNEGDVFEIDVQPFYDYSPIIRDAKNIGKGVEFLNRYLSSKLFQDPRQWQQNLFNFLRIHRYNGYQLLINERIRSPQHLSEQVKQALVVLSDRPPTEAYSEFRFELQNLGFEPGWGNTVARVRDTLEILDQLLDSPDHQVLEAFVSRIPMLFRILLISVHGWFGQEGVLGRPDTGGQVVYILDQVKSLEKQMREDLELAGLGVLEAQPKIIVLTRLIPNAEGTLCNQRLEKIYGTNDAWILRIPFREFNPKVTQNWISRFEIWPYLETWVIDVERELRAEFGHVPDLIIGNYSDGNLIAFLLARRLKITQCNIAHALEKSKYLFSNLYWQDLEDKYHFSLQFTADLIAMNAANFIISSTYQEIVGTPDSIGQYESYQSFTMPDLYHVVNGIELFSPKFNVVPPGVNEQVYFPYYHYTERLEGDRQRLEELLFTLEDPQQIYGYLEAPEKRPLFSMARLDRIKNLTGLAEAFGRSKALQERCNLILVAGKLRTADSSDREEIAEIEKLYQIIHQYNLHGKIRWLGIRLPKADSGEIYRIIADRQGIFVQPALFEAFGLTILEAMISGLPTFGTRFGGPLEIIQDGVNGFYINPTHLEEMAETIVRFLEACDRDPQEWQRISKAGIERVYSTYTWKIHCTRLLSLAKIYGFWNFSSQENREDMMRYMEALFHLLYKPRAQALLAEHLQR

SEQ ID NO: 1255 - protein, 808 aa, Artificial Sequence
  engineered sucrose synthase encoded in plasmid pA35431
MTCVLLKAVVESDERADLRQFSRILQLGEKRYLLRNDILDAFADYCRDQERPVPPPSESRLSKLVFYTQEIIVDNESLCWIVRPRIAQQEVCRLLVEDLTIVPMTIPELLDLRDRLVNHYHPNEGDVFEIDMQPFYDYSPIIRDAKNIGKGVEFLNRYLSSKLFQDPRQWQQNLFNFLRIHRYNGYQLLINERIRSPQHLSEQVKQALVVLSDRPPTEAYSEFRFELQNLGFEPGWGNTVARVRDTLEILDQLLDSPDHQVLEAFVSRIPMLFRIALISPHGWFGQEGVLGRPDTGGQVVYILDQVKSLEKQMREDLELAGLGVLEAQPKIIVLTRLIPNAEGTLCNQRLEKIYGTNDAWILRVPFREFNPKVTQNWISRFEIWPYLETFAIDAERELRAEFGHVPDLIIGNYSDGNLVAFLLARRLKVTQCNIAHALEKSKYLFSNLYWQDLEDKYHFSLQFTADLIAMNAANFIISSTYQEIVGTPDSIGQYESYQSFTMPDLYHVVNGIELFSPKFNVVPPGVNEQVYFPYYHYTERLEGDRQRLEELLFTLEDPQQIYGYLEAPEKRPLFSMARLDRIKNLTGLAEAFGRSKALQERCNLILVAGKLRTADSSDREEIAEIEKLYQIIHQYNLHGKIRWLGIRLPKADSGEIYRIIADRQGIFVQPALFEAFGLTILEAMISGLPTFGTRFGGPLEIIQDGVNGFYINPTHLEEMAETIVRFLEACDRDPQEWQRISKAGIERVYSTYTWKIHCTRLLSLAKIYGFWNFSSQENREDMMRYLEAMFHLLYKPRAQALLAEHLQR

SEQ ID NO: 1256 - protein, 808 aa, Artificial Sequence
  engineered sucrose synthase encoded in plasmid pA35432
MTCVLLKAVVESDERADLRQFSRILQLGEKRYLLRNDILDAFADYCRDQERPVPPPSESRLSKLVFYTQEIIVDNESLCWIVRPRIAQQEVCRLLVEDLTIVPMTIPELLDLRDRLVNHYHPNEGDVLELDWQPFYDYSPIIRDAKNIGKGVEFLNRYLSSKLFQDPRQWQQNLFNFLRIHRYNGYQLLINERIRSPQHLSEQVKQALVVLSDRPPTEAYSEFRFELQNLGFEPGWGNTVARVRDTLEILDQLLDSPDHQVLEAFVSRIPMLFRIALISPHGWFGQEGVLGRPDTGGQVVYILDQVKSLEKQMREDLELAGLGVLEAQPKIIVLTRLIPNAEGTLCNQRLEKIYGTNDAWILRVPFREFNPKVTQNWISRFEIWPYLETFAIDAERELRAEFGHVPDLIIGNYSDGNLVAFLLARRLKVTQCNIAHALEKSKYLFSNLYWQDLEDKYHFSLQFTADLIAMNAANFIISSTYQEIVGTPDSIGQYESYQSFTMPDLYHVVNGIELFSPKFNVVPPGVNEQVYFPYYHYTERLEGDRQRLEELLFTLEDPQQIYGYLEAPEKRPLFSMARLDRIKNLTGLAEAFGRSKALQERCNLILVAGKLRTADSSDREEIAEIEKLYQIIHQYNLHGKIRWLGIRLPKADSGEIYRIIADRQGIFVQPALFEAFGLTILEAMISGLPTFGTRFGGPLEIIQDGVNGFYINPTHLEEMAETIVRFLEACDRDPQEWQRISKAGIERVYSTYTWKIHCTRLLSLAKIYGFWNFSSQENREDMMRYLEALFHLLYKPRAQALLAEHLQR

SEQ ID NO: 1257 - protein, 808 aa, Artificial Sequence
  engineered sucrose synthase encoded in plasmid pA35434
MTCVLLKAVVESDERADLRQFSRILQLGEKRYLLRNDILDAFADYCRDQERPVPPPSESRLSKLVFYTQEIIVDNESLCWIVRPRIAQQEVCRLLVEDLTIVPMTIPELLDLRDRLVNHYHPNEGDVLELDWQPLYDYSPIIRDAKNIGKGVEFLNRYLSSKLFQDPRQWQQNLFNFLRIHRYNGYQLLINERIRSPQHLSEQVKQALVVLSDRPPTEAYSEFRFELQNLGFEPGWGNTVARVRDTLEILDQLLDSPDHQVLEAFVSRIPMLFRIALISPHGWFGQEGVLGRPDTGGQVVYILDQVKSLEKQMREDLELAGLGVLEAQPKIIVLTRLIPNAEGTLCNQRLEKIYGTNDAWILRVPFREFNPKVTQNWISRFEIWPYLETFAIDAERELRAEFGHVPDLIIGNYSDGNLVAFLLARRLKVTQCNIAHALEKSKYLFSNLYWQDLEDKYHFSLQFTADLIAMNAANFIISSTYQEIVGTPDSIGQYESYQSFTMPDLYHVVNGLELFSPKFNVVPPGVNEQVYFPYYHYTERLEGDRQRLEELLFTLEDPQQIYGYLEAPEKRPLFSMARLDRIKNLTGLAEAFGRSKALQERCNLILVAGKLRTADSSDREEIAEIEKLYQIIHQYNLHGKIRWLGIRLPKADSGEIYRIIADRQGIFVQPALFEAFGLTILEAMISGLPTFGTRFGGPLEIIQDGVNGFYINPTHLEEMAETIVRFLEACDRDPQEWQRISKAGIERVYSTYTWKIHCTRLLSLAKIYGFWNFSSQENREDMMRYIEAIFHLLYKPRAQALLAEHLQR

SEQ ID NO: 1258 - protein, 808 aa, Artificial Sequence
  engineered sucrose synthase encoded in plasmid pA35435
MTCVLLKAVVESDERADLRQFSRILQLGEKRYLLRNDILDAFADYCRDQERPVPPPSESRLSKLVFYTQEIIVDNESLCWIVRPRIAQQEVCRLLVEDLTIVPMTIPELLDLRDRLVNHYHPNEGDVWEIDLQPWYDYSPIIRDAKNIGKGVEFLNRYLSSKLFQDPRQWQQNLFNFLRIHRYNGYQLLINERIRSPQHLSEQVKQALVVLSDRPPTEAYSEFRFELQNLGFEPGWGNTVARVRDTLEILDQLLDSPDHQVLEAFVSRIPMLFRIALISPHGWFGQEGVLGRPDTGGQVVYILDQVKSLEKQMREDLELAGLGVLEAQPKIIVLTRLIPNAEGTLCNQRLEKIYGTNDAWILRVPFREFNPKVTQNWISRFEIWPYLETFAIDAERELRAEFGHVPDLIIGNYSDGNLVAFLLARRLKVTQCNIAHALEKSKYLFSNLYWQDLEDKYHFSLQFTADWIAMNAANFIISSTYQEIVGTPDSIGQYESYQSFTMPDLYHVVNGIELFSPKFNVVPPGVNEQVYFPYYHYTERLEGDRQRLEELLFTLEDPQQIYGYLEAPEKRPLFSMARLDRIKNLTGLAEAFGRSKALQERCNLILVAGKLRTADSSDREEIAEIEKLYQIIHQYNLHGKIRWLGIRLPKADSGEIYRIIADRQGIFVQPALFEAFGLTILEAMISGLPTFGTRFGGPLEIIQDGVNGFYINPTHLEEMAETIVRFLEACDRDPQEWQRISKAGIERVYSTYTWKIHCTRLLSLAKIYGFWNFSSQENREDMMRYLEAIFHLLYKPRAQALLAEHLQR

SEQ ID NO: 1259 - protein, 808 aa, Artificial Sequence
  engineered sucrose synthase encoded in plasmid pA35436
MTCVLLKAVVESDERADLRQFSRILQLGEKRYLLRNDILDAFADYCRDQERPVPPPSESRLSKLVFYTQEIIVDNESLCWIVRPRIAQQEVCRLLVEDLTIVPMTIPELLDLRDRLVNHYHPNEGDVWEIDWQPLYDYSPIIRDAKNIGKGVEFLNRYLSSKLFQDPRQWQQNLFNFLRIHRYNGYQLLINERIRSPQHLSEQVKQALVVLSDRPPTEAYSEFRFELQNLGFEPGWGNTVARVRDTLEILDQLLDSPDHQVLEAFVSRIPMLFRIALISPHGWFGQEGVLGRPDTGGQVVYILDQVKSLEKQMREDLELAGLGVLEAQPKIIVLTRLIPNAEGTLCNQRLEKIYGTNDAWILRVPFREFNPKVTQNWISRFEIWPYLETFAIDAERELRAEFGHVPDLIIGNYSDGNLVAFLLARRLKVTQCNIAHALEKSKYLFSNLYWQDLEDKYHFSLQFTADLIAMNAANFIISSTYQEIVGTPDSIGQYESYQSFTMPDLYHIVNGIELFSPKFNVVPPGVNEQVYFPYYHYTERLEGDRQRLEELLFTLEDPQQIYGYLEAPEKRPLFSMARLDRIKNLTGLAEAFGRSKALQERCNLILVAGKLRTADSSDREEIAEIEKLYQIIHQYNLHGKIRWLGIRLPKADSGEIYRIIADRQGIFVQPALFEAFGLTILEAMISGLPTFGTRFGGPLEIIQDGVNGFYINPTHLEEMAETIVRFLEACDRDPQEWQRISKAGIERVYSTYTWKIHCTRLLSLAKIYGFWNFSSQENREDMMRYLEAIFHLLYKPRAQALLAEHLQR

SEQ ID NO: 1260 - protein, 808 aa, Artificial Sequence
  engineered sucrose synthase encoded in plasmid pA35437
MTCVLLKAVVESDERADLRQFSRILQLGEKRYLLRNDILDAFADYCRDQERPVPPPSESRLSKLVFYTQEIIVDNESLCWIVRPRIAQQEVCRLLVEDLTIVPMTIPELLDLRDRLVNHYHPNEGDVFEIDVQPFYDYSPIIRDAKNIGKGVEFLNRYLSSKLFQDPRQWQQNLFNFLRIHRYNGYQLLINERIRSPQHLSEQVKQALVVLSDRPPTEAYSEFRFELQNLGFEPGWGNTVARVRDTLEILDQLLDSPDHQVLEAFVSRIPMLFRVAIISPHGWFGQEGVLGRPDTGGQVVYILDQVKSLEKQMREDLELAGLGVLEAQPKIIILTRLIPNAEGTLCNQRLEKIYGTNDAWILRVPFREFNPKVTQNWISRFEIWPYLETFAIDAERELRAEFGHVPDVIIGNYSDGNLVAFLLARRLKVTQINIAHALEKSKYLFSNLYWQDLEDKYHFSLQFTADLIAMNAANAIVSSTYQEIVGTPDSIGQYESYQSFTMPDLYHVVNGIELFSPKFNVIPPGVNEQVYFPYYHYTERLEGDRQRLEELLFTLEDPQQIYGYLEAPEKRPLFSMARLDRIKNLTGLAEAFGRSKALQERCNLILVAGKLRTADSSDREEIAEIEKLYQIIHQYNLHGKIRWLGIRLPKADSGEIYRIIADRQGIFVQPALFEAFGLTILEAMISGLPTFGTRFGGPLEIIQDGVNGFYINPTHLEEMAETIVRFLEACDRDPQEWQRISKAGIERVYSTYTWKIYCTRMMSLAKIMGFWNFSSQENREDMMRYMEALFHLLYKPRAQALLAEHLQR

SEQ ID NO: 1261 - protein, 808 aa, Artificial Sequence
  engineered sucrose synthase encoded in plasmid pA35438
MTCVLLKAVVESDERADLRQFSRILQLGEKRYLLRNDILDAFADYCRDQERPVPPPSESRLSKLVFYTQEIIVDNESLCWIVRPRIAQQEVCRLLVEDLTIVPMTIPELLDLRDRLVNHYHPNEGDVFEIDVQPFYDYSPIIRDAKNIGKGVEFLNRYLSSKLFQDPRQWQQNLFNFLRIHRYNGYQLLINERIRSPQHLSEQVKQALVVLSDRPPTEAYSEFRFELQNLGFEPGWGNTVARVRDTLEILDQLLDSPDHQVLEAFVSRIPMLFRIALISPHGWFGQEGVLGRPDTGGQVVYILDQVKSLEKQMREDLELAGLGVLEAQPKIIVLTRLIPNAEGTLCNQRLEKIYGTNDAWILRVPFREFNPKVTQNWISRFEIWPYLETFAIDAERELRAEFGHVPDLIIGNYSDGNLVAFLLARRLKVTQCNIAHALEKSKYLFSNLYWQDLEDKYHFSLQFTADLIAMNAANFIISSTYQEIVGTPDSIGQYESYQSFTMPDLYHVVNGIELFSPKFNVVPPGVNEQVYFPYYHYTERLEGDRQRLEELLFTLEDPQQIYGYLEAPEKRPIFSMSRLDRIKNQTGLMELVGRSKALQERCNLIVVAGKVRTADSSDREEIAEIEKIYQIIHQYNLHGKARWLGIRLPKADSGEIYRIIADRQGVFVQPALFEAFGLTILEAMISGLPTFGTRFGGPLEIIQDGVNGFYINPTHLEEMAETLVRFFEACDRDPQEWQRISKAGIERVYSTYTWKIHCTRLLSLAKIYGFWNFSSQENREDMMRYMEALFHLLYKPRAQALLAEHLQR

SEQ ID NO: 1262 - protein, 808 aa, Artificial Sequence
  engineered sucrose synthase encoded in plasmid pA35439
MTCVLLKAVVESDERADLRQFSRILQLGEKRYLLRNDILDAFADYCRDQERPVPPPSESRLSKLVFYTQEIIVDNESLCWIVRPRIAQQEVCRLLVEDLTIVPMTIPELLDLRDRLVNHYHPNEGDVFEIDVQPFYDYSPIIRDAKNIGKGVEFLNRYLSSKLFQDPRQWQQNLFNFLRIHRYNGYQLLINERIRSPQHLSEQVKQALVVLSDRPPTEAYSEFRFELQNLGFEPGWGNTVARVRDTLEILDQLLDSPDHQVLEAFVSRIPMLFRIILISIHGWFGQEGVLGRPDTGGQVVYILDQVKSLEKQMREDLELAGLGVLEAQPKILVITRLIPNAEGTLCNQRLEKIYGTNDAWILRIPFREFNPKVTQNWISRFEIWPYLETWVIDVEREIRAELGHVPDLIIGNYSDGNLVAFLLARRWKVTQCNIAHALEKSKYLFSNLYWQDLEDKYHFSLQFTADLIAMNAANFIISSTYQEIVGTPDSIGQYESYQSFTMPDLYHVVNGIELFSPKFNVVPPGVNEQVYFPYYHYTERLEGDRQRLEELLFTLEDPQQIYGYLEAPEKRPLFSMARLDRIKNLTGLAEAFGRSKALQERCNLILVAGKLRTADSSDREEIAEIEKLYQIIHQYNLHGKIRWLGIRLPKADSGEIYRIIADRQGIFVQPALFEAFGLTILEAMISGLPTFGTRFGGPLEIIQDGVNGFYINPTHLEEMAETIVRFLEACDRDPQEWQRISKAGIERVYSTYTWKIHCTRLLSLAKIYGFWNFSSQENREDMMRYMEALFHLLYKPRAQALLAEHLQR

SEQ ID NO: 1263 - protein, 808 aa, Artificial Sequence
  engineered sucrose synthase encoded in plasmid pA35440
MTCVLLKAVVESDERADLRQFSRILQLGEKRYLLRNDILDAFADYCRDQERPVPPPSESRLSKLVFYTQEIIVDNESLCWIVRPRIAQQEVCRLLVEDLTIVPMTIPELLDLRDRLVNHYHPNEGDVWEIDWQPLYDYSPIIRDAKNIGKGVEFLNRYLSSKLFQDPRQWQQNLFNFLRIHRYNGYQLLINERIRSPQHLSEQVKQALVVLSDRPPTEAYSEFRFELQNLGFEPGWGNTVARVRDTLEILDQLLDSPDHQVLEAFVSRIPMLFRVAIISPHGWFGQEGVLGRPDTGGQVVYILDQVKSLEKQMREDLELAGLGVLEAQPKIIILTRLIPNAEGTLCNQRLEKIYGTNDAWILRVPFREFNPKVTQNWISRFEIWPYLETFAIDAERELRAEFGHVPDVIIGNYSDGNLVAFLLARRLKVTQINIAHALEKSKYLFSNLYWQDLEDKYHFSLQFTADLIAMNAANAIVSSTYQEIVGTPDSIGQYESYQSFTMPDLYHIVNGIELFSPKFNVIPPGVNEQVYFPYYHYTERLEGDRQRLEELLFTLEDPQQIYGYLEAPEKRPIFSMSRLDRIKNQTGLMELVGRSKALQERCNLIVVAGKVRTADSSDREEIAEIEKIYQIIHQYNLHGKARWLGIRLPKADSGEIYRIIADRQGVFVQPALFEAFGLTILEAMISGLPTFGTRFGGPLEIIQDGVNGFYINPTHLEEMAETLVRFFEACDRDPQEWQRISKAGIERVYSTYTWKIYCTRMMSLAKIMGFWNFSSQENREDMMRYLEAIFHLLYKPRAQALLAEHLQR

SEQ ID NO: 1264 - protein, 808 aa, Artificial Sequence
  engineered sucrose synthase encoded in plasmid pA35441
MTCVLLKAVVESDERADLRQFSRILQLGEKRYLLRNDILDAFADYCRDQERPVPPPSESRLSKLVFYTQEIIVDNESLCWIVRPRIAQQEVCRLLVEDLTIVPMTIPELLDLRDRLVNHYHPNEGDVWEIDWQPLYDYSPIIRDAKNIGKGVEFLNRYLSSKLFQDPRQWQQNLFNFLRIHRYNGYQLLINERIRSPQHLSEQVKQALVVLSDRPPTEAYSEFRFELQNLGFEPGWGNTVARVRDTLEILDQLLDSPDHQVLEAFVSRIPMLFRVIIISIHGWFGQEGVLGRPDTGGQVVYILDQVKSLEKQMREDLELAGLGVLEAQPKILIITRLIPNAEGTLCNQRLEKIYGTNDAWILRIPFREFNPKVTQNWISRFEIWPYLETWVIDVEREIRAELGHVPDVIIGNYSDGNLVAFLLARRWKVTQINIAHALEKSKYLFSNLYWQDLEDKYHFSLQFTADLIAMNAANAIVSSTYQEIVGTPDSIGQYESYQSFTMPDLYHIVNGIELFSPKFNVIPPGVNEQVYFPYYHYTERLEGDRQRLEELLFTLEDPQQIYGYLEAPEKRPLFSMARLDRIKNLTGLAEAFGRSKALQERCNLILVAGKLRTADSSDREEIAEIEKLYQIIHQYNLHGKIRWLGIRLPKADSGEIYRIIADRQGIFVQPALFEAFGLTILEAMISGLPTFGTRFGGPLEIIQDGVNGFYINPTHLEEMAETIVRFLEACDRDPQEWQRISKAGIERVYSTYTWKIYCTRMMSLAKIMGFWNFSSQENREDMMRYLEAIFHLLYKPRAQALLAEHLQR

SEQ ID NO: 1265 - protein, 808 aa, Artificial Sequence
  engineered sucrose synthase encoded in plasmid pA35442
MTCVLLKAVVESDERADLRQFSRILQLGEKRYLLRNDILDAFADYCRDQERPVPPPSESRLSKLVFYTQEIIVDNESLCWIVRPRIAQQEVCRLLVEDLTIVPMTIPELLDLRDRLVNHYHPNEGDVWEIDWQPLYDYSPIIRDAKNIGKGVEFLNRYLSSKLFQDPRQWQQNLFNFLRIHRYNGYQLLINERIRSPQHLSEQVKQALVVLSDRPPTEAYSEFRFELQNLGFEPGWGNTVARVRDTLEILDQLLDSPDHQVLEAFVSRIPMLFRIILISIHGWFGQEGVLGRPDTGGQVVYILDQVKSLEKQMREDLELAGLGVLEAQPKILVITRLIPNAEGTLCNQRLEKIYGTNDAWILRIPFREFNPKVTQNWISRFEIWPYLETWVIDVEREIRAELGHVPDLIIGNYSDGNLVAFLLARRWKVTQCNIAHALEKSKYLFSNLYWQDLEDKYHFSLQFTADLIAMNAANFIISSTYQEIVGTPDSIGQYESYQSFTMPDLYHIVNGIELFSPKFNVVPPGVNEQVYFPYYHYTERLEGDRQRLEELLFTLEDPQQIYGYLEAPEKRPIFSMSRLDRIKNQTGLMELVGRSKALQERCNLIVVAGKVRTADSSDREEIAEIEKIYQIIHQYNLHGKARWLGIRLPKADSGEIYRIIADRQGVFVQPALFEAFGLTILEAMISGLPTFGTRFGGPLEIIQDGVNGFYINPTHLEEMAETLVRFFEACDRDPQEWQRISKAGIERVYSTYTWKIHCTRLLSLAKIYGFWNFSSQENREDMMRYLEAIFHLLYKPRAQALLAEHLQR

SEQ ID NO: 1266 - protein, 808 aa, Artificial Sequence
  engineered sucrose synthase encoded in plasmid pA35443
MTCVLLKAVVESDERADLRQFSRILQLGEKRYLLRNDILDAFADYCRDQERPVPPPSESRLSKLVFYTQEIIVDNESLCWIVRPRIAQQEVCRLLVEDLTIVPMTIPELLDLRDRLVNHYHPNEGDVFEIDVQPFYDYSPIIRDAKNIGKGVEFLNRYLSSKLFQDPRQWQQNLFNFLRIHRYNGYQLLINERIRSPQHLSEQVKQALVVLSDRPPTEAYSEFRFELQNLGFEPGWGNTVARVRDTLEILDQLLDSPDHQVLEAFVSRIPMLFRVIIISIHGWFGQEGVLGRPDTGGQVVYILDQVKSLEKQMREDLELAGLGVLEAQPKILIITRLIPNAEGTLCNQRLEKIYGTNDAWILRIPFREFNPKVTQNWISRFEIWPYLETWVIDVEREIRAELGHVPDVIIGNYSDGNLVAFLLARRWKVTQINIAHALEKSKYLFSNLYWQDLEDKYHFSLQFTADLIAMNAANAIVSSTYQEIVGTPDSIGQYESYQSFTMPDLYHVVNGIELFSPKFNVIPPGVNEQVYFPYYHYTERLEGDRQRLEELLFTLEDPQQIYGYLEAPEKRPIFSMSRLDRIKNQTGLMELVGRSKALQERCNLIVVAGKVRTADSSDREEIAEIEKIYQIIHQYNLHGKARWLGIRLPKADSGEIYRIIADRQGVFVQPALFEAFGLTILEAMISGLPTFGTRFGGPLEIIQDGVNGFYINPTHLEEMAETLVRFFEACDRDPQEWQRISKAGIERVYSTYTWKIYCTRMMSLAKIMGFWNFSSQENREDMMRYMEALFHLLYKPRAQALLAEHLQR

SEQ ID NO: 1267 - protein, 808 aa, Artificial Sequence
  engineered sucrose synthase encoded in plasmid pA35444
MTCVLLKAVVESDERADLRQFSRILQLGEKRYLLRNDILDAFADYCRDQERPVPPPSESRLSKLVFYTQEIIVDNESLCWIVRPRIAQQEVCRLLVEDLTIVPMTIPELLDLRDRLVNHYHPNEGDVWEIDWQPLYDYSPIIRDAKNIGKGVEFLNRYLSSKLFQDPRQWQQNLFNFLRIHRYNGYQLLINERIRSPQHLSEQVKQALVVLSDRPPTEAYSEFRFELQNLGFEPGWGNTVARVRDTLEILDQLLDSPDHQVLEAFVSRIPMLFRVIIISIHGWFGQEGVLGRPDTGGQVVYILDQVKSLEKQMREDLELAGLGVLEAQPKILIITRLIPNAEGTLCNQRLEKIYGTNDAWILRIPFREFNPKVTQNWISRFEIWPYLETWVIDVEREIRAELGHVPDVIIGNYSDGNLVAFLLARRWKVTQINIAHALEKSKYLFSNLYWQDLEDKYHFSLQFTADLIAMNAANAIVSSTYQEIVGTPDSIGQYESYQSFTMPDLYHIVNGIELFSPKFNVIPPGVNEQVYFPYYHYTERLEGDRQRLEELLFTLEDPQQIYGYLEAPEKRPIFSMSRLDRIKNQTGLMELVGRSKALQERCNLIVVAGKVRTADSSDREEIAEIEKIYQIIHQYNLHGKARWLGIRLPKADSGEIYRIIADRQGVFVQPALFEAFGLTILEAMISGLPTFGTRFGGPLEIIQDGVNGFYINPTHLEEMAETLVRFFEACDRDPQEWQRISKAGIERVYSTYTWKIYCTRMMSLAKIMGFWNFSSQENREDMMRYLEAIFHLLYKPRAQALLAEHLQR

SEQ ID NO: 1268 - protein, 808 aa, Artificial Sequence
  engineered sucrose synthase encoded in plasmid pA35872
MTCVLLKAVVESDERADLRQFSRILQLGEKRYLLRNDILDAFADYCRDQERPVPPPSESRLSKLVFYTQEIIVDNESLCWIVRPRIAQQEVCRLLVEDLTIVPMTIPELLDLRDRLVNHYHPNEGDVFEIDVQPFYDYSPIIRDAKNIGKGVEFLNRYLSSKLFQDPRQWQQNLFNFLRIHRYNGYQLLINERIRSPQHLSEQVKQALVVLSDRPPTEAYSEFRFELQNLGFEPGWGNTVARVRDTLEILDQLLDSPDHQVLEAFVSRIPMLFRIALISPHGWFGQEGVLGRPDTGGQVVYILDQVKSLEKQMREDLELAGLGVLEAQPKIIVLTRLIPNAEGTLCNQRLEKIYGTNDAWILRVPFREFNPKVTQNWISRFEIWPYLETFAIDAERELRAEFGHVPDLIIGNYSDGNLVAFLLARRLKVTQCNIAHALEKSKYLFSNLYWQDLEDKYHFSLQFTADLIAMNAANFIISSTYQEIVGTPDSIGQYESYQSFTMPDLYHVVNGIELFSPKFNVVPPGVNEQVYFPYYHYTERLEGDRQRLEELLFTLEDPQQIYGYLEAPEKRPLFSMARLDRIKNLTGLAEAFGRSKALQERCNLILVAGKVRTADSSDREEIAEIEKLYQIIHQYNLNGKIRWLGIRLPKADSGEIYRIIADRQGIFVQPALFEAFGLTILEAMITGLPTFGTQFGGPLEIIQDGVNGFYINPTHLEETAETIVRFIEACDRDPQEWQRISKAGIERVYSKYTWKIHTSRLLSLAKIYGFWNFSSQENREDLMRYMEALFHLLYKPRAQALLAEHLQR

SEQ ID NO: 1269 - protein, 808 aa, Artificial Sequence
  engineered sucrose synthase encoded in plasmid pA35873
MTCVLLKAVVESDERADLRQFSRILQLGEKRYLLRNDILDAFADYCRDQERPVPPPSESRLSKLVFYTQEIIVDNESLCWIVRPRIAQQEVCRLLVEDLTIVPMTIPELLDLRDRLVNHYHPNEGDVFEIDVQPFYDYSPIIRDAKNIGKGVEFLNRYLSSKLFQDPRQWQQNLFNFLRIHRYNGYQLLINERIRSPQHLSEQVKQALVVLSDRPPTEAYSEFRFELQNLGFEPGWGNTVARVRDTLEILDQLLDSPDHQVLEAFVSRIPMLFRIALISPHGWFGQEGVLGRPDTGGQVVYILDQVKSLEKQMREDLELAGLGVLEAQPKIIVLTRLIPNAEGTLCNQRLEKIYGTNDAWILRVPFREFNPKVTQNWISRFEIWPYLETFAIDAERELRAEFGHVPDLIIGNYSDGNLVAFLLARRLKVTQCNIAHALEKSKYLFSNLYWQDLEDKYHFSLQFTADLIAMNAANFIISSTYQEIVGTPDSIGQYESYQSFTMPDLYHVVNGIELFSPKFNVVPPGVNEQVYFPYYHRTERLEGDAQRLEELLFTLEDPQQIYGYLEAPEKRPLFSMARLDRIKNLTGLAEAFGRSKALQERCNLILVAGKVRPAGSSDREEIAEIEKLYQIIHEYNLHGKIRWLGIRLPKADSGEIYRIIADRQGIFVQPALFEAFGLTILEAMISGLPTFGTQFGGPLEIIQDGVNGFYINPTHLEEMAEAIVRFIEACDRDPQEWQRISKAGIQRVYSTYTWKIHTTRLLSLAKIYGFWNFSSQENREDLMRYMEALFHLLFKPRAQALLAEHLQR

SEQ ID NO: 1270 - protein, 808 aa, Artificial Sequence
  engineered sucrose synthase encoded in plasmid pA35874
MTCVLLKAVVESDERADLRQFSRILQLGEKRYLLRNDILDAFADYCRDQERPVPPPSESRLSKLVFYTQEIIVDNESLCWIVRPRIAQQEVCRLLVEDLTIVPMTIPELLDLRDRLVNHYHPNEGDVFEIDVQPFYDYSPIIRDAKNIGKGVEFLNRYLSSKLFQDPRQWQQNLFNFLRIHRYNGYQLLINERIRSPQHLSEQVKQALVVLSDRPPTEAYSEFRFELQNLGFEPGWGNTVARVRDTLEILDQLLDSPDHQVLEAFVSRIPMLFRIALISPHGWFGQEGVLGRPDTGGQVVYILDQVKSLEKQMREDLELAGLGVLEAQPKIIVLTRLIPNAEGTLCNQRLEKIYGTNDAWILRVPFREFNPKVTQNWISRFEIWPYLETFAIDAERELRAEFGHVPDLIIGNYSDGNLVAFLLARRLKVTQCNIAHALEKSKYLFSNLYWQDLEDKYHFSLQFTADLIAMNAANFIISSTYQEIVGTPDSIGQYESYQSFTMPDLYHVVNGIELFSPKFNVVPPGVNEQVYFPYYHYTERLEGERQRLEELLFTLEDPQQIYGYLEAPHKRPLFSMARLDRIKNLTGLAEAFGRSKALQERCNLILVAGKVRTEDSSDREEIAEIEKLYQIIHQYNLKGKIRWLGIRLPKADSGEIYRIIADRGGIFVQPALFEAFGLTILEAMITGLPTFATRFGGPLEIIQDGVNGFYINPTHLEETAETILRFLEACDRDPQEWQRISKAGIERVYSKYTWKIHTSRLLSLAKIYGFWNFSSQENREDMMRYMEALFHLLYKPRAQALLAEHLQR

SEQ ID NO: 1271 - protein, 808 aa, Artificial Sequence
  engineered sucrose synthase encoded in plasmid pA35875
MTCVLLKAVVESDERADLRQFSRILQLGEKRYLLRNDILDAFADYCRDQERPVPPPSESRLSKLVFYTQEIIVDNESLCWIVRPRIAQQEVCRLLVEDLTIVPMTIPELLDLRDRLVNHYHPNEGDVFEIDVQPFYDYSPIIRDAKNIGKGVEFLNRYLSSKLFQDPRQWQQNLFNFLRIHRYNGYQLLINERIRSPQHLSEQVKQALVVLSDRPPTEAYSEFRFELQNLGFEPGWGNTVARVRDTLEILDQLLDSPDHQVLEAFVSRIPMLFRIALISPHGWFGQEGVLGRPDTGGQVVYILDQVKSLEKQMREDLELAGLGVLEAQPKIIVLTRLIPNAEGTLCNQRLEKIYGTNDAWILRVPFREFNPKVTQNWISRFEIWPYLETFAIDAERELRAEFGHVPDLIIGNYSDGNLVAFLLARRLKVTQCNIAHALEKSKYLFSNLYWQDLEDKYHFSLQFTADLIAMNAANFIISSTYQEIVGTPDSIGQYESYQSFTMPDLYHVVNGIELFSPKFNVVPPGVNEQVYFPYYHRTERLEGDRQRLEELLFTLEDPQQIYGYLEAPEKRPLFSMARLDRIKNLTGLAEAFGRSQALQERCNLILVAGKVRTADSSDREEIAEIEKLYQIIHQYNLNGKIRWLGIRLPKIDSGEVYRIIADRQGIFVQPALFEAFGLTILEAMITGLPTFATQFGGPLEIIQDGVNGFYINPTHLEETAETIMRFLEACDRDPQEWQRISKAGIERVYSKYTWKIHCSRLLSLAKIYGFWNFSSQENREDLMRYMEALFHLLYKPRAQALLAEHLQR

SEQ ID NO: 1272 - protein, 808 aa, Artificial Sequence
  engineered sucrose synthase encoded in plasmid pA35876
MTCVLLKAVVESDERADLRQFSRILQLGEKRYLLRNDILDAFADYCRDQERPVPPPSESRLSKLVFYTQEIIVDNESLCWIVRPRIAQQEVCRLLVEDLTIVPMTIPELLDLRDRLVNHYHPNEGDVFEIDVQPFYDYSPIIRDAKNIGKGVEFLNRYLSSKLFQDPRQWQQNLFNFLRIHRYNGYQLLINERIRSPQHLSEQVKQALVVLSDRPPTEAYSEFRFELQNLGFEPGWGNTVARVRDTLEILDQLLDSPDHQVLEAFVSRIPMLFRIALISPHGWFGQEGVLGRPDTGGQVVYILDQVKSLEKQMREDLELAGLGVLEAQPKIIVLTRLIPNAEGTLCNQRLEKIYGTNDAWILRVPFREFNPKVTQNWISRFEIWPYLETFAIDAERELRAEFGHVPDLIIGNYSDGNLVAFLLARRLKVTQCNIAHALEKSKYLFSNLYWQDLEDKYHFSLQFTADLIAMNAANFIISSTYQEIVGTPDSIGQYESYQSFTMPDLYHVVNGIELFSPKFNVVPPGVNEQVYFPYYHYTERLEGDRQRLEELLFTLEDPQQIYGYLEAPHKRPLFSMARLDRIKNLTGLAEAFGRSKALQERCNLILVAGKVRTEDSSDREEIAEIEKLYQIIHQYNLQGKIRWLGIRLPKADSGEIYRIIADRQGIFVQPALFEAFGLTILEAMITGLPTFGTRFGGPLEIIQDGVNGFYINPTHLEETAETIFRFIEACDRDPQQWQEISKAGIQRVYSTYTWKIHTSRLLSLAKIYGFWNFSSQENREDLMRYMEALFHLLYKPRAQALLAEHLQR

SEQ ID NO: 1273 - protein, 808 aa, Artificial Sequence
  engineered sucrose synthase encoded in plasmid pA35877
MTCVLLKAVVESDERADLRQFSRILQLGEKRYLLRNDILDAFADYCRDQERPVPPPSESRLSKLVFYTQEIIVDNESLCWIVRPRIAQQEVCRLLVEDLTIVPMTIPELLDLRDRLVNHYHPNEGDVFEIDVQPFYDYSPIIRDAKNIGKGVEFLNRYLSSKLFQDPRQWQQNLFNFLRIHRYNGYQLLINERIRSPQHLSEQVKQALVVLSDRPPTEAYSEFRFELQNLGFEPGWGNTVARVRDTLEILDQLLDSPDHQVLEAFVSRIPMLFRIALISPHGWFGQEGVLGRPDTGGQVVYILDQVKSLEKQMREDLELAGLGVLEAQPKIIVLTRLIPNAEGTLCNQRLEKIYGTNDAWILRVPFREFNPKVTQNWISRFEIWPYLETFAIDAERELRAEFGHVPDLIIGNYSDGNLVAFLLARRLKVTQCNIAHALEKSKYLFSNLYWQDLEDKYHFSLQFTADLIAMNAANFIISSTYQEIVGTPDSIGQYESYQSFTMPDLYHVVNGIELFSPKFNVVPPGVNEQVYFPYYHRTERLENERQRLEELLFTLEDPQQIYGYLEAPEKRPLFSMARLDRIKNLTGLAEAFGRSKALQERCNLILVAGKVRPAGSSDREEIAEIEKLYQIIHQYNLHGKIRWLGIRLPKADSGEIYRIIADRQGIFVQPALFEAFGLTILEAMISGLPTFGTQFGGPLEIIQDGVNGFYINPTHLEEMAEAIVRFIEACDRDPQEWQRISKAGIQRVYSNYTWKIHTTRLLSLAKIYGFWNFSSQENREDLMRYMEALFHLLYKPRAQALLAEHLQR

SEQ ID NO: 1274 - protein, 808 aa, Artificial Sequence
  engineered sucrose synthase encoded in plasmid pA35878
MTCVLLKAVVESDERADLRQFSRILQLGEKRYLLRNDILDAFADYCRDQERPVPPPSESRLSKLVFYTQEIIVDNESLCWIVRPRIAQQEVCRLLVEDLTIVPMTIPELLDLRDRLVNHYHPNEGDVFEIDVQPFYDYSPIIRDAKNIGKGVEFLNRYLSSKLFQDPRQWQQNLFNFLRIHRYNGYQLLINERIRSPQHLSEQVKQALVVLSDRPPTEAYSEFRFELQNLGFEPGWGNTVARVRDTLEILDQLLDSPDHQVLEAFVSRIPMLFRIALISPHGWFGQEGVLGRPDTGGQVVYILDQVKSLEKQMREDLELAGLGVLEAQPKIIVLTRLIPNAEGTLCNQRLEKIYGTNDAWILRVPFREFNPKVTQNWISRFEIWPYLETFAIDAERELRAEFGHVPDLIIGNYSDGNLVAFLLARRLKVTQCNIAHALEKSKYLFSNLYWQDLEDKYHFSLQFTADLIAMNAANFIISSTYQEIVGTPDSIGQYESYQSFTMPDLYHVVNGIELFSPKFNVVPPGVNEQVYFPYYHRTERLEGDRQRLEELLFTLEDPQQIYGYLEAPHKRPLFSMARLDRIKNLTGLAEAFGRSKALQERCNLILVAGKVRTEDSSDREEIAEIEKLYQIIHQYNLNGKIRWLGIRLPKADSGEIYRIIADRQGIFVQPALFEAFGLTILEAMITGLPTFATQFGGPLEIIQDGVNGFYINPTHLEETAETIVRFIEACDRDPQEWQRISKAGIQRVYSKYTWKIHTSRLLSLAKIYGFWNFSSQENREDLMRYMEALFHLLYKPRAQALLAEHLQR

SEQ ID NO: 1275 - protein, 808 aa, Artificial Sequence
  engineered sucrose synthase encoded in plasmid pA35879
MTCVLLKAVVESDERADLRQFSRILQLGEKRYLLRNDILDAFADYCRDQERPVPPPSESRLSKLVFYTQEIIVDNESLCWIVRPRIAQQEVCRLLVEDLTIVPMTIPELLDLRDRLVNHYHPNEGDVFEIDVQPFYDYSPIIRDAKNIGKGVEFLNRYLSSKLFQDPRQWQQNLFNFLRIHRYNGYQLLINERIRSPQHLSEQVKQALVVLSDRPPTEAYSEFRFELQNLGFEPGWGNTVARVRDTLEILDQLLDSPDHQVLEAFVSRIPMLFRIALISPHGWFGQEGVLGRPDTGGQVVYILDQVKSLEKQMREDLELAGLGVLEAQPKIIVLTRLIPNAEGTLCNQRLEKIYGTNDAWILRVPFREFNPKVTQNWISRFEIWPYLETFAIDAERELRAEFGHVPDLIIGNYSDGNLVAFLLARRLKVTQCNIAHALEKSKYLFSNLYWQDLEDKYHFSLQFTADLIAMNAANFIISSTYQEIVGTPDSIGQYESYQSFTMPDLYHVVNGIELFSPKFNVVPPGVNEQVYFPYYHRTERLEGERQRLEELLFTLEDPQQIYGYLEAPHKRPLFSMARLDRIKNLTGLAEAFGKSKALQERCNLILVAGKVRTAGSSDREEIAEIEKLYQIIHQYNLHGKIRWLGIRLPKADSGEVYRIIADRQGIFVQPALFEAFGLTILEAMITGLPTFGTQFGGPLEIIQDGVNGFYINPTHLEETAEAIVRFLEACDRDPQQWQEISKAGIERVYSTYTWKIHTSRLLSLAKIYGFWNFSSQENREDLMRYIEALFHLLYKPRAQALLAEHLQR

SEQ ID NO: 1276 - protein, 808 aa, Artificial Sequence
  engineered sucrose synthase encoded in plasmid pA35880
MTCVLLKAVVESDERADLRQFSRILQLGEKRYLLRNDILDAFADYCRDQERPVPPPSESRLSKLVFYTQEIIVDNESLCWIVRPRIAQQEVCRLLVEDLTIVPMTIPELLDLRDRLVNHYHPNEGDVFEIDVQPFYDYSPIIRDAKNIGKGVEFLNRYLSSKLFQDPRQWQQNLFNFLRIHRYNGYQLLINERIRSPQHLSEQVKQALVVLSDRPPTEAYSEFRFELQNLGFEPGWGNTVARVRDTLEILDQLLDSPDHQVLEAFVSRIPMLFRIALISPHGWFGQEGVLGRPDTGGQVVYILDQVKSLEKQMREDLELAGLGVLEAQPKIIVLTRLIPNAEGTLCNQRLEKIYGTNDAWILRVPFREFNPKVTQNWISRFEIWPYLETFAIDAERELRAEFGHVPDLIIGNYSDGNLVAFLLARRLKVTQCNIAHALEKSKYLFSNLYWQDLEDKYHFSLQFTADLIAMNAANFIISSTYQEIVGTPDSIGQYESYQSFTMPDLYHVVNGIELFSPKFNVVPPGVNEQVYFPYYHYTERLEGDAQRLEELLFTLEDPQQIYGYLEAPEKRPLFSMARLDRIKNLTGLAEAFGRSQALQERCNLILVAGKVRPADSSDREEIAEIEKLYQIIHQYNLSGKIRWLGIRLPKADSGEIYRIIADRQGIFVQPALFEAFGLTILEAMISGLPTFGTQFGGPLEIIQDGVNGFYINPTHLEETAEAIMRFIEACDRDPQEWQRISKAGIQRVYSTYTWKIHTSRLLSLAKIYGFWNFSSQENREDLMRYMEALFHLLFKPRAQALLAEHLQR

SEQ ID NO: 1277 - protein, 808 aa, Artificial Sequence
  engineered sucrose synthase encoded in plasmid pA35881
MTCVLLKAVVESDERADLRQFSRILQLGEKRYLLRNDILDAFADYCRDQERPVPPPSESRLSKLVFYTQEIIVDNESLCWIVRPRIAQQEVCRLLVEDLTIVPMTIPELLDLRDRLVNHYHPNEGDVFEIDVQPFYDYSPIIRDAKNIGKGVEFLNRYLSSKLFQDPRQWQQNLFNFLRIHRYNGYQLLINERIRSPQHLSEQVKQALVVLSDRPPTEAYSEFRFELQNLGFEPGWGNTVARVRDTLEILDQLLDSPDHQVLEAFVSRIPMLFRIALISPHGWFGQEGVLGRPDTGGQVVYILDQVKSLEKQMREDLELAGLGVLEAQPKIIVLTRLIPNAEGTLCNQRLEKIYGTNDAWILRVPFREFNPKVTQNWISRFEIWPYLETFAIDAERELRAEFGHVPDLIIGNYSDGNLVAFLLARRLKVTQCNIAHALEKSKYLFSNLYWQDLEDKYHFSLQFTADLIAMNAANFIISSTYQEIVGTPDSIGQYESYQSFTMPDLYHVVNGIELFSPKFNVVPPGVNEQVYFPYYHRTERLEGERQRLEELLFTLEDPQQIYGYLEAPHKRPLFSMARLDRIKNLTGLAEAFGRSKALQERCNLILVAGKVRTEDSSDREEIAEIEKLYQIIHEYNLNGKIRWLGIRLPKIDSGEIYRIIADRGGIFVQPALFEAFGLTILESMITGLPTFATRFGGPLEIIQDGVNGFYINPTHLEETAETILRFLEACDRDPQEWQRISKAGIQRVYSKYTWKIHTSRLLSLAKIYGFWNFSSQENREDMMRYMEALFHLLYKPRAQQLLAEHLQR

SEQ ID NO: 1278 - protein, 808 aa, Artificial Sequence
  engineered sucrose synthase encoded in plasmid pA35882
MTCVLLKAVVESDERADLRQFSRILQLGEKRYLLRNDILDAFADYCRDQERPVPPPSESRLSKLVFYTQEIIVDNESLCWIVRPRIAQQEVCRLLVEDLTIVPMTIPELLDLRDRLVNHYHPNEGDVFEIDVQPFYDYSPIIRDAKNIGKGVEFLNRYLSSKLFQDPRQWQQNLFNFLRIHRYNGYQLLINERIRSPQHLSEQVKQALVVLSDRPPTEAYSEFRFELQNLGFEPGWGNTVARVRDTLEILDQLLDSPDHQVLEAFVSRIPMLFRIALISPHGWFGQEGVLGRPDTGGQVVYILDQVKSLEKQMREDLELAGLGVLEAQPKIIVLTRLIPNAEGTLCNQRLEKIYGTNDAWILRVPFREFNPKVTQNWISRFEIWPYLETFAIDAERELRAEFGHVPDLIIGNYSDGNLVAFLLARRLKVTQCNIAHALEKSKYLFSNLYWQDLEDKYHFSLQFTADLIAMNAANFIISSTYQEIVGTPDSIGQYESYQSFTMPDLYHVVNGIELFSPKFNVVPPGVNEQVYFPYYHRTERLEGDRQRLEELLFTLEDPQQIYGYLEAPEKRPLFSMARLDRIKNLTGLAEAFGRSKALQERCNLILVAGKVRTEDSSDREEIAEIEKLYQIIHEYQLQGKIRWLGIRLPKADSGEIYRIIADRGGIFVQPALFEAFGLTILEAMISGLPTFGTQFGGPLEIIQDGVNGFYINPTDLEETAETIVRFIEACDRDPQEWQRISKAGIERVYSKYTWKIHCSRLLSLSKIYGFWNFSSQENREDLMRYMEALFHLLYKPRAQALLAEHLQR

SEQ ID NO: 1279 - protein, 808 aa, Artificial Sequence
  engineered sucrose synthase encoded in plasmid pA35884
MTCVLLKAVVESDERADLRQFSRILQLGEKRYLLRNDILDAFADYCRDQERPVPPPSESRLSKLVFYTQEIIVDNESLCWIVRPRIAQQEVCRLLVEDLTIVPMTIPELLDLRDRLVNHYHPNEGDVFEIDVQPFYDYSPIIRDAKNIGKGVEFLNRYLSSKLFQDPRQWQQNLFNFLRIHRYNGYQLLINERIRSPQHLSEQVKQALVVLSDRPPTEAYSEFRFELQNLGFEPGWGNTVARVRDTLEILDQLLDSPDHQVLEAFVSRIPMLFRIALISPHGWFGQEGVLGRPDTGGQVVYILDQVKSLEKQMREDLELAGLGVLEAQPKIIVLTRLIPNAEGTLCNQRLEKIYGTNDAWILRVPFREFNPKVTQNWISRFEIWPYLETFAIDAERELRAEFGHVPDLIIGNYSDGNLVAFLLARRLKVTQCNIAHALEKSKYLFSNLYWQDLEDKYHFSLQFTADLIAMNAANFIISSTYQEIVGTPDSIGQYESYQSFTMPDLYHVVNGIELFSPKFNVVPPGVNEQVYFPYYHRTERLEGERQRLEELLFTLEDPQQIYGYLEAPHKRPLFSMARLDRIKNLTGLAEAFGRSKALQERCNLILVAGKVRPEDSSDREEIAEIEKLYQIIHEYNLNGKIRWLGIRLPKADSGEIYRIIADRQGIFVQPALFEAFGLTILEAMITGLPTFATQFGGPLEIIQDGVNGFYINPTHLEETAETILRFIEACDRDPQEWQRISKAGIQRVYSKYTWKIHTSRLLSLAKIYGFWNFSSQENREDLMRYMEALFHLLYKPRAQQLLAEHLQR

SEQ ID NO: 1280 - protein, 808 aa, Artificial Sequence
  engineered sucrose synthase encoded in plasmid pA35886
MTCVLLKAVVESDERADLRQFSRILQLGEKRYLLRNDILDAFADYCRDQERPVPPPSESRLSKLVFYTQEIIVDNESLCWIVRPRIAQQEVCRLLVEDLTIVPMTIPELLDLRDRLVNHYHPNEGDVFEIDVQPFYDYSPIIRDAKNIGKGVEFLNRYLSSKLFQDPRQWQQNLFNFLRIHRYNGYQLLINERIRSPQHLSEQVKQALVVLSDRPPTEAYSEFRFELQNLGFEPGWGNTVARVRDTLEILDQLLDSPDHQVLEAFVSRIPMLFRIALISPHGWFGQEGVLGRPDTGGQVVYILDQVKSLEKQMREDLELAGLGVLEAQPKIIVLTRLIPNAEGTLCNQRLEKIYGTNDAWILRVPFREFNPKVTQNWISRFEIWPYLETFAIDAERELRAEFGHVPDLIIGNYSDGNLVAFLLARRLKVTQCNIAHALEKSKYLFSNLYWQDLEDKYHFSLQFTADLIAMNAANFIISSTYQEIVGTPDSIGQYESYQSFTMPDLYHVVNGIELFSPKFNVVPPGVNEQVYFPYYHRTERLENERQRLEELLFTLEDPQQIYGYLEAPEKRPLFSMARLDRIKNLTGLAEAFGRSQALQERCNLILVAGKVDPAGSSDREEIAEIEKLYQIIHQYNLNGKIRWLGIRLPKADSGEIYRIIADRQGIFVQPALFEAFGLTILEAMISGLPTFATQFGGPLEIIQDGVNGFYINPTHLEETAEAILRFIEACDRDPQEWQRISKAAIERVYSTYTWKIHTSRLLSLAKIYGFWNFSSQENREDLMRYMEALFHLLFKPRAQALLAEHLQR

SEQ ID NO: 1281 - protein, 808 aa, Artificial Sequence
  engineered sucrose synthase encoded in plasmid pA35887
MTCVLLKAVVESDERADLRQFSRILQLGEKRYLLRNDILDAFADYCRDQERPVPPPSESRLSKLVFYTQEIIVDNESLCWIVRPRIAQQEVCRLLVEDLTIVPMTIPELLDLRDRLVNHYHPNEGDVFEIDVQPFYDYSPIIRDAKNIGKGVEFLNRYLSSKLFQDPRQWQQNLFNFLRIHRYNGYQLLINERIRSPQHLSEQVKQALVVLSDRPPTEAYSEFRFELQNLGFEPGWGNTVARVRDTLEILDQLLDSPDHQVLEAFVSRIPMLFRIALISPHGWFGQEGVLGRPDTGGQVVYILDQVKSLEKQMREDLELAGLGVLEAQPKIIVLTRLIPNAEGTLCNQRLEKIYGTNDAWILRVPFREFNPKVTQNWISRFEIWPYLETFAIDAERELRAEFGHVPDLIIGNYSDGNLVAFLLARRLKVTQCNIAHALEKSKYLFSNLYWQDLEDKYHFSLQFTADLIAMNAANFIISSTYQEIVGTPDSIGQYESYQSFTMPDLYHVVNGIELFSPKFNVVPPGVNEQVYFPYYHRTERLEGDRQRLEELLFTLEDPQQIYGYLEAPEKRPLFSMARLDRIKNLTGLAEAFGRSKALQERCNLILVAGKVRTADSSDREEIAEIEKLYQIIHQYNLNGKIRWLGIRLPKADSGEVYRVIADRQGIFVQPALFEAFGLTILESMITGLPTFGTQFGGPLEIIQDGVNGFYINPTHLEETAEAIVKFIEACDRDPQQWQEISKAGIQRVYSKYTWKIHTSRLLSLAKIYGFWNFSSQENREDLLRYMEALFHLLYKPRAQALLAEHLQR

SEQ ID NO: 1282 - protein, 808 aa, Artificial Sequence
  engineered sucrose synthase encoded in plasmid pA35888
MTCVLLKAVVESDERADLRQFSRILQLGEKRYLLRNDILDAFADYCRDQERPVPPPSESRLSKLVFYTQEIIVDNESLCWIVRPRIAQQEVCRLLVEDLTIVPMTIPELLDLRDRLVNHYHPNEGDVFEIDVQPFYDYSPIIRDAKNIGKGVEFLNRYLSSKLFQDPRQWQQNLFNFLRIHRYNGYQLLINERIRSPQHLSEQVKQALVVLSDRPPTEAYSEFRFELQNLGFEPGWGNTVARVRDTLEILDQLLDSPDHQVLEAFVSRIPMLFRIALISPHGWFGQEGVLGRPDTGGQVVYILDQVKSLEKQMREDLELAGLGVLEAQPKIIVLTRLIPNAEGTLCNQRLEKIYGTNDAWILRVPFREFNPKVTQNWISRFEIWPYLETFAIDAERELRAEFGHVPDLIIGNYSDGNLVAFLLARRLKVTQCNIAHALEKSKYLFSNLYWQDLEDKYHFSLQFTADLIAMNAANFIISSTYQEIVGTPDSIGQYESYQSFTMPDLYHVVNGIELFSPKFNVVPPGVNEQVYFPYYHNTERLEGERQRLEELLFTLEDPQQIYGYLEAPHKRPLFSMARLDRIKNLTGLAEAFGRSKALQERCNLILVAGKVRTEGSSDREEIAEIEKLYQIIHEYNLQGKIRWLGIRLPKADSGEIYRIIADRQGIFVQPALFEAFGLTILEAMITGLPTFATQFGGPLEIIQDGVNGFYINPTHLEETAETILKFIEACDRDPQEWQRISKKGIQRVYSKYTWKIHTSRLLSLSKIYGFWNFSSQENREDLMRYIEALFHLLYKPRAQQLLAEHLQR

SEQ ID NO: 1283 - protein, 808 aa, Artificial Sequence
  engineered sucrose synthase encoded in plasmid pA35889
MTCVLLKAVVESDERADLRQFSRILQLGEKRYLLRNDILDAFADYCRDQERPVPPPSESRLSKLVFYTQEIIVDNESLCWIVRPRIAQQEVCRLLVEDLTIVPMTIPELLDLRDRLVNHYHPNEGDVFEIDVQPFYDYSPIIRDAKNIGKGVEFLNRYLSSKLFQDPRQWQQNLFNFLRIHRYNGYQLLINERIRSPQHLSEQVKQALVVLSDRPPTEAYSEFRFELQNLGFEPGWGNTVARVRDTLEILDQLLDSPDHQVLEAFVSRIPMLFRIALISPHGWFGQEGVLGRPDTGGQVVYILDQVKSLEKQMREDLELAGLGVLEAQPKIIVLTRLIPNAEGTLCNQRLEKIYGTNDAWILRVPFREFNPKVTQNWISRFEIWPYLETFAIDAERELRAEFGHVPDLIIGNYSDGNLVAFLLARRLKVTQCNIAHALEKSKYLFSNLYWQDLEDKYHFSLQFTADLIAMNAANFIISSTYQEIVGTPDSIGQYESYQSFTMPDLYHVVNGIELFSPKFNVVPPGVNEQVYFPYYHRTERLEGDAQRLEELLFTLEDPQQIYGYLEAPKKRPLFSMARLDRIKNLTGLAEAFGRSKALQERCNLILVAGKVRPAGSSDREEIAEIEKLYQIIHQYNLHGKIRWLGIRLPKADSGEIYRIIADRQGIFVQPALFEAFGLTILEAMITGLPTFGTQFGGPLEIIQDGVNGFYINPTHLEETAEAIVRFIAACDRDPNQWQEISKAGIQRVYSKYTWKIHTSRLLSLAKIYGFWNFSSQENREDLMRYMEALFHLLFKPRAQALLAEHLQR

SEQ ID NO: 1284 - protein, 808 aa, Artificial Sequence
  engineered sucrose synthase encoded in plasmid pA35890
MTCVLLESVVESDERADLRQFSRILQLGEKGYLLRNDILDAFADYCRNQDRPVPPPSESRLSKLVFYTQEIIVDNESLCWIIRPRIAQQEVCRLLVEDLTIVPMTIPELLDLRDRLVNHYHPNEGDVFEIDVQPFYDYSPIIRDAKNIGKGVEFLNRYLSSKLFQDPRQWQQNLFNFLQIHRYNGYQLLINERIRSPQHLSEQVKQALVVLSDRAPAEAYSEFRFELQNLGFEPGWGNTVARVRDTLEILDQLLDSPDHQVLEAFVSRIPMLFRIALISPHGWFGQEGVLGRPDTGGQVVYILDQVKSLEKQMREDLELAGLGVLEARPKIIVLTRLIPNAEGTLCNQRLEKIYGTNDAWILRVPFREFNPKVTQNWISRFEIWPYLETFAIDAERELRAEFGHVPDLIIGNYSDGNLVAFLLARRLKVTQCNIAHALEKSKYLFSNLYWQDLEDKYHFSLQFTADLIAMNAANFIISSTYQEIVGTPDSIGQYESYQSFTMPDLYHVVNGIELFSPKFNVVPPGVNEQVYFPYYHYTERLEGDRQRLEELLFTLEDPQQIYGYLEAPEKRPLFSMARLDRIKNLTGLAEAFGRSKALQERCNLILVAGKLRTADSSDREEIAEIEKLYQIIHQYNLHGKIRWLGIRLPKADSGEIYRIIADRQGIFVQPALFEAFGLTILEAMISGLPTFGTRFGGPLEIIQDGVNGFYINPTHLEEMAETIVRFLEACDRDPQEWQRISKAGIERVYSTYTWKIHCTRLLSLAKIYGFWNFSSQENREDMMRYMEALFHLLYKPRAQALLAEHLQR

SEQ ID NO: 1285 - protein, 808 aa, Artificial Sequence
  engineered sucrose synthase encoded in plasmid pA35891
MTSELLKAVVESDERADLRQFSRILQLGEKRYLLRNDILQAFADYCRDQQRPVPFPSESGLSKLVFYTQEIIVDNESLCWIVRPRIAQQEVCRLLVEDLTIVPMTIPELLDLRDRLVNHYHPNEGDVFEIDVQPFYDYSPIIRDAKNIGKGVEFLNRYLSSKLFQDPRQWQQNLFNFLRIHRYNGYQLLINERIRSPQHLSEQVKQALVVLSDRAPAEAYSEFRFELQNLGFEPGWGNTVARVRDTLEILDQLLDSPDHQVLEAFVSRIPMLFRIALISPHGWFGQEGVLGRPDTGGQVVYILDQVKSLEKQMREDLELAGLGVLEARPKIIVLTRLIPNAEGTLCNQRLEKIYGTNDAWILRVPFREFNPKVTQNWISRFEIWPYLETFAIDAERELLAEFGHVPDLIIGNYSDGNLVAFLLARRLKVTQCNIAHALEKSKYLFSNLYWQDLEDKYHFSLQFTADLIAMNAANFIISSTYQEIVGTPDSIGQYESYQSFTMPDLYHVVNGIELFSPKFNVVPPGVNEQVYFPYYHYTERLEGDRQRLEELLFTLEDPQQIYGYLEAPEKRPLFSMARLDRIKNLTGLAEAFGRSKALQERCNLILVAGKLRTADSSDREEIAEIEKLYQIIHQYNLHGKIRWLGIRLPKADSGEIYRIIADRQGIFVQPALFEAFGLTILEAMISGLPTFGTRFGGPLEIIQDGVNGFYINPTHLEEMAETIVRFLEACDRDPQEWQRISKAGIERVYSTYTWKIHCTRLLSLAKIYGFWNFSSQENREDMMRYMEALFHLLYKPRAQALLAEHLQR

SEQ ID NO: 1286 - protein, 808 aa, Artificial Sequence
  engineered sucrose synthase encoded in plasmid pA35892
MTSVLLKSVVESDERADLRQFSRILQLGEKRYLLRNDILGAFADYCRAQDRPVPTPSESRLSKLVFYTQEIIVDNESLCWIIRPRIAQQEVCRLLVEDLTIVPMTIPELLDLRDRLVNHYHPNEGDVFEIDVQPFYDYSPIIRDAKNIGKGVEFLNRYLSSKLFQDPRQWQQNLFNFLQIHRYNGYQLLINERIRSPQHLSEQVKQALVALSDRAPAEAYSEFRFELQNLGFEPGWGNTAARVRDTLEILDQLLDSPDHQVLEAFVSRIPMLFRIALISPHGWFGQEGVLGRPDTGGQVVYILDQVKSLEKQMREDLELAGLGVLEARPKIIVLTRLIPNAEGTLCNQRLEKIYGTNDAWILRVPFREFNPKVTQNWISRFEIWPYLETFAIDAERELRAEFGHVPDLIIGNYSDGNLVAFLLARRLKVTQCNIAHALEKSKYLFSNLYWQDLEDKYHFSMQFTADLIAMNAANFIISSTYQEIVGTPDSIGQYESYQSFTMPDLYHVVNGIELFSPKFNVVPPGVNEQVYFPYYHYTERLEGDRQRLEELLFTLEDPQQIYGYLEAPEKRPLFSMARLDRIKNLTGLAEAFGRSKALQERCNLILVAGKLRTADSSDREEIAEIEKLYQIIHQYNLHGKIRWLGIRLPKADSGEIYRIIADRQGIFVQPALFEAFGLTILEAMISGLPTFGTRFGGPLEIIQDGVNGFYINPTHLEEMAETIVRFLEACDRDPQEWQRISKAGIERVYSTYTWKIHCTRLLSLAKIYGFWNFSSQENREDMMRYMEALFHLLYKPRAQALLAEHLQR

SEQ ID NO: 1287 - protein, 808 aa, Artificial Sequence
  engineered sucrose synthase encoded in plasmid pA35893
MTCVLLESVVNSDERADLRQFSRILQLGEKRYLLRNDILDAFADYCRNQERPVPPPDESRLSKLVFYTQEIIVDNESLCWIVRPQIAQQEVCRLLVEDLTIVPMTIPELLDLRDRLVNHYHPNEGDVFEIDVQPFYDYSPIIRDAKNIGKGVEFLNRYLSSKLFQDPRQWQQNLFNFLQIHRYNGYQLLINERIRSPQHLSEQVKQALVFLSDRAPAEAYSEFRFELQNLGFEPGWGNTVARVRDTLEILDQLLDSPDHQVLEAFVSRIPMLFRIALISPHGWFGQEGVLGRPDTGGQVVYILDQVKSLEKQMREDLELAGLGVLEARPKIIVLTRLIPNAEGTLCNQRLEKIYGTNDAWILRVPFREFNPKVTQNWISRFEIWPYLETFAIDAERELRAEFGHVPDLIIGNYSDGNLVAFLLARRLKVTQCNIAHALEKSKYLFSNLYWQDLEDKYHFSLQFTADLIAMNAANFIISSTYQEIVGTPDSIGQYESYQSFTMPDLYHVVNGIELFSPKFNVVPPGVNEQVYFPYYHYTERLEGDRQRLEELLFTLEDPQQIYGYLEAPEKRPLFSMARLDRIKNLTGLAEAFGRSKALQERCNLILVAGKLRTADSSDREEIAEIEKLYQIIHQYNLHGKIRWLGIRLPKADSGEIYRIIADRQGIFVQPALFEAFGLTILEAMISGLPTFGTRFGGPLEIIQDGVNGFYINPTHLEEMAETIVRFLEACDRDPQEWQRISKAGIERVYSTYTWKIHCTRLLSLAKIYGFWNFSSQENREDMMRYMEALFHLLYKPRAQALLAEHLQR

SEQ ID NO: 1288 - protein, 808 aa, Artificial Sequence
  engineered sucrose synthase encoded in plasmid pA35895
MTAVLLESVVESDERADLRQFSRILQLGEKGYLLRNDILDAFADYCRAQDRPVPPPDESGLSKLVFYTQEIIVDNESLCWIVRPRIAQQEVCRLLVEDLTIVPMTIPELLDLRDRLVNHYHPNEGDVFEIDVQPFYDYSPIIRDAKNIGKGVEFLNRYLSSKLFQDPRQWQQNLFNFLQIHRYNGYQLLINERIRSPQHLSEQVKQALVVLSDRPPAEAYSEFRFELQNLGFEPGWGNTVARVRDTLEILDQLLDSPDHQVLEAFVSRIPMLFRIALISPHGWFGQEGVLGRPDTGGQVVYILDQVKSLEKQMREDLELAGLGVLEARPKIIVLTRLIPNAEGTLCNQRLEKIYGTNNAWILRVPFREFNPKVTQNWISRFEIWPYLETFAIDAERELRAEFGHVPDLIIGNYSDGNLVAFLLARRLKVTQCNIAHALEKSKYLFSNLYWQDLEDKYHFSLQFTADLIAMNAANFIISSTYQEIVGTPDSIGQYESYQSFTMPDLYHVVNGIELFSPKFNVVPPGVNEQVYFPYYHYTERLEGDRQRLEELLFTLEDPQQIYGYLEAPEKRPLFSMARLDRIKNLTGLAEAFGRSKALQERCNLILVAGKLRTADSSDREEIAEIEKLYQIIHQYNLHGKIRWLGIRLPKADSGEIYRIIADRQGIFVQPALFEAFGLTILEAMISGLPTFGTRFGGPLEIIQDGVNGFYINPTHLEEMAETIVRFLEACDRDPQEWQRISKAGIERVYSTYTWKIHCTRLLSLAKIYGFWNFSSQENREDMMRYMEALFHLLYKPRAQALLAEHLQR

SEQ ID NO: 1289 - protein, 808 aa, Artificial Sequence
  engineered sucrose synthase encoded in plasmid pA35896
MTSVLLESVIESDERADLRQFSRILQLGEKGYLLRNDILQAFADYCRNQDRPVPPPDESRLSKLVFYTQEIIVDNESLCWIIRPRIAQQEVCRLLVEDLTIVPMTIPELLDLRDRLVNHYHPNEGDVFEIDVQPFYDYSPIIRDAKNIGKGVEFLNRYLSSKLFQDPRQWQQNLFNFLQIHRYNGYQLLINERIRSPQHLSEQVKQALVALSDRAPAEAYSEFRFELQNLGFEPGWGNTVARVRDTLEILDQLLDSPDHQVLEAFVSRIPMLFRIALISPHGWFGQEGVLGRPDTGGQVVYILDQVKSLEKQMREDLELAGLGVLEARPKIIVLTRLIPNAEGTLCNQRLEKIYGTNDAWILRVPFREFNPKVTQNWISRFEIWPYLETFAIDAERELRAEFGHVPDLIIGNYSDGNLVAFLLARRLKVTQCNIAHALEKSKYLFSNLYWQDLEDKYHFSLQFTADLIAMNAANFIISSTYQEIVGTPDSIGQYESYQSFTMPDLYHVVNGIELFSPKFNVVPPGVNEQVYFPYYHYTERLEGDRQRLEELLFTLEDPQQIYGYLEAPEKRPLFSMARLDRIKNLTGLAEAFGRSKALQERCNLILVAGKLRTADSSDREEIAEIEKLYQIIHQYNLHGKIRWLGIRLPKADSGEIYRIIADRQGIFVQPALFEAFGLTILEAMISGLPTFGTRFGGPLEIIQDGVNGFYINPTHLEEMAETIVRFLEACDRDPQEWQRISKAGIERVYSTYTWKIHCTRLLSLAKIYGFWNFSSQENREDMMRYMEALFHLLYKPRAQALLAEHLQR

SEQ ID NO: 1290 - protein, 808 aa, Artificial Sequence
  engineered sucrose synthase encoded in plasmid pA35897
MTCDLLESVVNSDERADLRQFSRILQLGEKRYLLRNDILDAFADYCRAQQRPVPTPDESRLSKLVFYTQEIIVDNESLCWIVRPQIAQQEVCRLLVEDLTIVPITIPELLDLRDRLVNHYHPNEGDVFEIDVRPFYDYSPIIRDAKNIGKGVEFLNRYLSSKLFQDPRQWQQNLFNFLQIHRYNGYQLLINERIRSPQHLSEQVKQALVALSDRAPAEAYSEFRFELQNLGFEPGWGNTVARVRDTLEILDQLLDSPDHQVLEAFVSRIPMLFRIALISPHGWFGQEGVLGRPDTGGQVVYILDQVKSLEKQMREDLELAGLGVLEARPKIIVLTRLIPNAEGTLCNQRLEKIYGTNDAWILRVPFREFNPKVTQNWISRFEIWPYLETFAIDAERELLAEFGHVPDLIIGNYSDGNLVAFLLARRLKVTQCNIAHALEKSKYLFSNLYWQDLEDKYHFSLQFTADLIAMNAANFIISSTYQEIVGTPDSIGQYESYQSFTMPDLYHVVNGIELFSPKFNVVPPGVNEQVYFPYYHYTERLEGDRQRLEELLFTLEDPQQIYGYLEAPEKRPLFSMARLDRIKNLTGLAEAFGRSKALQERCNLILVAGKLRTADSSDREEIAEIEKLYQIIHQYNLHGKIRWLGIRLPKADSGEIYRIIADRQGIFVQPALFEAFGLTILEAMISGLPTFGTRFGGPLEIIQDGVNGFYINPTHLEEMAETIVRFLEACDRDPQEWQRISKAGIERVYSTYTWKIHCTRLLSLAKIYGFWNFSSQENREDMMRYMEALFHLLYKPRAQALLAEHLQR

SEQ ID NO: 1291 - protein, 808 aa, Artificial Sequence
  engineered sucrose synthase encoded in plasmid pA35898
MTSVLLKSVIESDERADLRQFSRLLQLGEKRYLLRNDILQAFADYCRALQRPVPTPSESRLSKLVFYTQEIIVDNESLCWIIRPRIAQQEVCRLLVEDLTIVPMTIPELLDLRDRLVNHYHPNEGDVFEIDVQPFYDYSPIIRDAKNIGKGVEFLNRFLSSKLFQDPRQWQQNLFNFLQIHRYNGYQLLINERIRSPQHLSEQVKQALVALSDRAPAEAYSEFRFELQNLGFEPGWGNTAARVRDTLEILDQLLDSPDHQVLEAFVSRIPMLFRIALISPHGWFGQEGVLGRPDTGGQVVYILDQVKSLEKQMREDLELAGLGVLEARPKIIVLTRLIPNAEGTLCNQRLEKIYGTNDAWILRVPFREFNPKVTQNWISRFEIWPYLETFAIDAERELRAEFGHVPDLIIGNYSDGNLVAFLLSRRMKVTQCNIAHALEKSKYLFSNLYWQDLEDKYHFSLQFTADLIAMNAANFIISSTYQEIVGTPDSIGQYESYQSFTMPDLYHVVNGIELFSPKFNVVPPGVNEQVYFPYYHYTERLEGDRQRLEELLFTLEDPQQIYGYLEAPEKRPLFSMARLDRIKNLTGLAEAFGRSKALQERCNLILVAGKLRTADSSDREEIAEIEKLYQIIHQYNLHGKIRWLGIRLPKADSGEIYRIIADRQGIFVQPALFEAFGLTILEAMISGLPTFGTRFGGPLEIIQDGVNGFYINPTHLEEMAETIVRFLEACDRDPQEWQRISKAGIERVYSTYTWKIHCTRLLSLAKIYGFWNFSSQENREDMMRYMEALFHLLYKPRAQALLAEHLQR

SEQ ID NO: 1292 - protein, 808 aa, Artificial Sequence
  engineered sucrose synthase encoded in plasmid pA35899
MTAVLLESVVNSDERADLRQFSRILQLGEKGYLLRNDILDAFADYCRNQDKPVPPPSESRLSKLVFYTQEIIVDNESLCWIVRPRIAQQEVCRLLVEDLTIVPMTIPELLDLRDRLVNHYHPNEGDVFEIDVQPFYDYSPIIRDAKNIGKGVEFLNRFMSSKLFQDPRQWQQNLFNFLQIHRYNGYQLLINERIRSPQHLSEQVKQALVFLSDRAPAEAYSEFRFELQNLGFEPGWGNTVARVRDTLEILDQLLDSPDHQVLEAFVSRIPMLFRIALISPHGWFGQEGVLGRPDTGGQVVYILDQVKSLEKQMREDLELAGLEVLEARPKIIVLTRLIPNAEGTLCNQRLEKIYGTNDAWILRVPFREFNPKVTQNWISRFEIWPYLETFALDAERELRAEFGHVPDLIIGNYSDGNLVAFLLARRLKVTQCNIAHALEKSKYLFSNLYWQDLEDKYHFSLQFTADLIAMNAANFIISSTYQEIVGTPDSIGQYESYQSFTMPDLYHVVNGIELFSPKFNVVPPGVNEQVYFPYYHYTERLEGDRQRLEELLFTLEDPQQIYGYLEAPEKRPLFSMARLDRIKNLTGLAEAFGRSKALQERCNLILVAGKLRTADSSDREEIAEIEKLYQIIHQYNLHGKIRWLGIRLPKADSGEIYRIIADRQGIFVQPALFEAFGLTILEAMISGLPTFGTRFGGPLEIIQDGVNGFYINPTHLEEMAETIVRFLEACDRDPQEWQRISKAGIERVYSTYTWKIHCTRLLSLAKIYGFWNFSSQENREDMMRYMEALFHLLYKPRAQALLAEHLQR

SEQ ID NO: 1293 - protein, 808 aa, Artificial Sequence
  engineered sucrose synthase encoded in plasmid pA35901
MTCELLESVVNSDERADLRQFSRILQLGEKGYLLRNDILQAFADYCRNQQRPVPPPDESRLSKLVFYTQEIIVDNESLCWIIRPQIAQQEVCRLLVEDLTIVPMTIPELLDLRDRLVNHYHPNEGDVFEIDVQPFYDYSPIIRDAKNIGKGVEFLNRYMSSKLFQDPRQWQQNLFQFLQIHRYNGYQLLINERIRSPQHLSEQVKQALVVLSDRAPAEAYSEFRFELQNLGFEPGWGNTVARVRDTLEILDQLLDSPDHQVLEAFVSRIPMLFRIALISPHGWFGQEGVLGRPDTGGQVVYILDQVKSLEKQMREDLELAGLGVLEARPKIIVLTRLIPNAEGTLCNQRLEKIYGTNDAWILRVPFREFNPKVTQNWISRFEIWPYLETFTIDAERELLAEFGHVPDLIIGNYSDGNLVAFLLARRLKVTQCNIAHALEKSKYLFSNLYWQDLEDKYHFSLQFTADLIAMNAANFIISSTYQEIVGTPDSIGQYESYQSFTMPDLYHVVNGIELFSPKFNVVPPGVNEQVYFPYYHYTERLEGDRQRLEELLFTLEDPQQIYGYLEAPEKRPLFSMARLDRIKNLTGLAEAFGRSKALQERCNLILVAGKLRTADSSDREEIAEIEKLYQIIHQYNLHGKIRWLGIRLPKADSGEIYRIIADRQGIFVQPALFEAFGLTILEAMISGLPTFGTRFGGPLEIIQDGVNGFYINPTHLEEMAETIVRFLEACDRDPQEWQRISKAGIERVYSTYTWKIHCTRLLSLAKIYGFWNFSSQENREDMMRYMEALFHLLYKPRAQALLAEHLQR

SEQ ID NO: 1294 - protein, 808 aa, Artificial Sequence
  engineered sucrose synthase encoded in plasmid pA35902
MTSVLLESVINSDERADLRQFSRILQLGEKGYLLRNDILQAFADYCRNQDRPVPTPDESRLSKLVFYTQEIIVDNESLCWIIRPRIAQQEVCRLLVEDLTIVPITIPELLDLRDRLVNHYHPNEGDVFEIDVQPFYDYSPIIRDAKNIGKGVEFLNRYLSSKLFQDPRQWQQNLFNFLQIHRYNGYQLLINERIRSPQHLSEQVKQALVALSDRAPAEAYSEFRFELQNLGFEPGWGNTVARVRDTLEILDQLLDSPDHQVLEAFVSRIPMLFRIALISPHGWFGQEGVLGRPDTGGQVVYILDQVKSLEKQMREDLELAGLGVLEARPKIIVLTRLIPNAEGTLCNQRLEKIYGTNDAWILRVPFREFNPKVTQNWISRFEIWPYLETFAIDAERELRAEFGHVPDLIIGNYSDGNLVAFLLSRRLKVTQCNIAHALEKSKYLFSNLYWQDLEDKYHFSMQFTADLIAMNAANFIISSTYQEIVGTPDSIGQYESYQSFTMPDLYHVVNGIELFSPKFNVVPPGVNEQVYFPYYHYTERLEGDRQRLEELLFTLEDPQQIYGYLEAPEKRPLFSMARLDRIKNLTGLAEAFGRSKALQERCNLILVAGKLRTADSSDREEIAEIEKLYQIIHQYNLHGKIRWLGIRLPKADSGEIYRIIADRQGIFVQPALFEAFGLTILEAMISGLPTFGTRFGGPLEIIQDGVNGFYINPTHLEEMAETIVRFLEACDRDPQEWQRISKAGIERVYSTYTWKIHCTRLLSLAKIYGFWNFSSQENREDMMRYMEALFHLLYKPRAQALLAEHLQR

SEQ ID NO: 1295 - protein, 808 aa, Artificial Sequence
  engineered sucrose synthase encoded in plasmid pA35903
MTSVLLKSVVESDERADLRQFSRQLQLGEKRYLLRNDILGAFADYCRALDRPVPTPSESGLSKLVFYTQEIIVDNESLCWIIRPRIAQQEVCRLLVEDLTIVPMTIPELLDLRDRLVNRYHPNEGDVFEIDVQPFYDYSPIIRDAKNIGKGVEFLNRYLSSKLFQDPRQWQQNLFNFLQIHRYNGYQLLINERIRSPQHLSEQVKQALVALSDRASDEAYSEFRFELQNLGFEPGWGNTAARVRDTLEILDQLLDSPDHQVLEAFVSRIPMLFRIALVSPHGWFGQEGVLGRPDTGGQVVYILDQVKNLEKQMREDLELAGLGVLEARPKIIVLTRLIPNAEGTLCNQRLEKIYGTNNAWILRVPFREFNPKVTQNWISRFEIWPYLETFAIDAERELLAEFGHVPDLIIGNYSDGNLVAFLLARRMKVTQCNIAHALEKSKYLFSNLYWQDLEDKYHFSMQFTADLIAMNAANFIISSTYQEIVGTPDSIGQYESYQSFTMPDLYHVVNGIELFSPKFNVVPPGVNEQVYFPYYHYTERLEGDRQRLEELLFTLEDPQQIYGYLEAPEKRPLFSMARLDRIKNLTGLAEAFGRSKALQERCNLILVAGKLRTADSSDREEIAEIEKLYQIIHQYNLHGKIRWLGIRLPKADSGEIYRIIADRQGIFVQPALFEAFGLTILEAMISGLPTFGTRFGGPLEIIQDGVNGFYINPTHLEEMAETIVRFLEACDRDPQEWQRISKAGIERVYSTYTWKIHCTRLLSLAKIYGFWNFSSQENREDMMRYMEALFHLLYKPRAQALLAEHLQR

SEQ ID NO: 1296 - protein, 808 aa, Artificial Sequence
  engineered sucrose synthase encoded in plasmid pA35904
MTSELLESVLNSDEKADLRQFSRILQLGEKGYLLRNDILQAFADYCRNQQKPVPFPDESGLSKLVFYTQEIIVDNESLCWIVRPRIAQQEVCRLLVEDLTIVPMTIPELLDLRDRLVNHYHPNEGDVFEIDVQPFYDYSPIIRDAKNIGKGVEFLNRYLSSKLFQDPRQWQQNLFQFLQIHQYNGYQLLINERIRSPQHLSEQVKQALVYLSDQPPAEAYSEFRFELQNLGFEPGWGNTVARVRDTLEILDQLLDSPDHQVLEAFVSRIPMLFRIALISPHGWFGQEGVLGRPDTGGQVVYILDQVKSLEKQMREDLELAGLGVLEARPKIIVLTRLIPNAEGTLCNQRLEKIYGTNDAWILRVPFREFNPKVTQNWISRFEIWPYLETFAIDAERELLAEFQHVPDLIIGNYSDGNLVAFLLARRLKVTQCNIAHALEKSKYLFSNLYWQDLEDKYHFSLQFTADLIAMNAANFIISSTYQEIVGTPDSIGQYESYQSFTMPDLYHVVNGIELFSPKFNVVPPGVNEQVYFPYYHYTERLEGDRQRLEELLFTLEDPQQIYGYLEAPEKRPLFSMARLDRIKNLTGLAEAFGRSKALQERCNLILVAGKLRTADSSDREEIAEIEKLYQIIHQYNLHGKIRWLGIRLPKADSGEIYRIIADRQGIFVQPALFEAFGLTILEAMISGLPTFGTRFGGPLEIIQDGVNGFYINPTHLEEMAETIVRFLEACDRDPQEWQRISKAGIERVYSTYTWKIHCTRLLSLAKIYGFWNFSSQENREDMMRYMEALFHLLYKPRAQALLAEHLQR

SEQ ID NO: 1297 - protein, 808 aa, Artificial Sequence
  engineered sucrose synthase encoded in plasmid pA35905
MTADLLKSVLNSDERADLRQFSRILQLGEKGYLLRNEILDAFADYCRNQQRPVPTPDESGLSKLVFYTQEIIVDNESLCWIIRPQIAQQEVCRLLVEDLTIVPITIPELLDLRDRLVNHYHPNEGDVFEIDVQPFYDYSPIIRDAKNIGKGVEFLNRYLSSKLFQDPRQWQQNLFNFLQIHQYNGYQLLINERIRSPQHLSEQVKQALVFLSDRAPAEAYSEFRFELQNLGFEPGWGNTVARVRDTLEILDQLLDSPDHQVLEAFVSRIPMLFRIALISPHGWFGQEGVLGRPDTGGQVVYILDQVKSLEKQMREDIELAGLEVLEARPKIIVLTRLIPNAEGTLCNQRLEKIYGTNDAWILRVPFREFNPKVTQNWISRFEIWPYLETFAIDAERELRAEFGHVPDLIIGNYSDGNLVAFLLARRLKVTQCNIAHALEKSKYLFSNLYWQDLEDKYHFSLQFTADLITMNAANFIISSTYQEIVGTPDSIGQYESYQSFTMPDLYHVVNGIELFSPKFNVVPPGVNEQVYFPYYHYTERLEGDRQRLEELLFTLEDPQQIYGYLEAPEKRPLFSMARLDRIKNLTGLAEAFGRSKALQERCNLILVAGKLRTADSSDREEIAEIEKLYQIIHQYNLHGKIRWLGIRLPKADSGEIYRIIADRQGIFVQPALFEAFGLTILEAMISGLPTFGTRFGGPLEIIQDGVNGFYINPTHLEEMAETIVRFLEACDRDPQEWQRISKAGIERVYSTYTWKIHCTRLLSLAKIYGFWNFSSQENREDMMRYMEALFHLLYKPRAQALLAEHLQR

SEQ ID NO: 1298 - protein, 808 aa, Artificial Sequence
  engineered sucrose synthase encoded in plasmid pA35906
MTSELLESVIESDERADLRQFSRILQLGEKRYLLRNDILGAFADYCRAKDRPVPFPLESGLSKLVFYTQEIIVDNESLCWIVRPRIAQQEVCRLLVEDLTIVPMTIPELLDLRDRLVNHYHPNEGDVFEIDVEPFYDYSPIIRDAKNIGKGVEFLNRYLSSKLFQDPRQWQQNLFNFLQIHRYNGYQLLINERIRSPPHLSEQVKQALVALSDRAPAEAYSEFRFELQNLGFEPGWGNTAARVRDTLEILDQLLDSPDHQVLEAFVSRIPMIFRIALISPHGWFGQEGVLGRPDTGGQVVYILDQVQSLEKQMREDLELAGLGVLEARPKIIVLTRLIPNAEGTLCNQRLEKIYGTNNAWILRVPFREFNPKVTQNWISRFEIWPYLETFAIDAERELLAEFGHVPDLIIGNYSDGNLVAFLLARRLKVTQCNIAHALEKSKYLFSNLYWQDLEDKYHFSLQFTADLIAMNAANFIISSTYQEIVGTPDSIGQYESYQSFTMPDLYHVVNGIELFSPKFNVVPPGVNEQVYFPYYHYTERLEGDRQRLEELLFTLEDPQQIYGYLEAPEKRPLFSMARLDRIKNLTGLAEAFGRSKALQERCNLILVAGKLRTADSSDREEIAEIEKLYQIIHQYNLHGKIRWLGIRLPKADSGEIYRIIADRQGIFVQPALFEAFGLTILEAMISGLPTFGTRFGGPLEIIQDGVNGFYINPTHLEEMAETIVRFLEACDRDPQEWQRISKAGIERVYSTYTWKIHCTRLLSLAKIYGFWNFSSQENREDMMRYMEALFHLLYKPRAQALLAEHLQR

SEQ ID NO: 1299 - protein, 808 aa, Artificial Sequence
  engineered sucrose synthase encoded in plasmid pA35907
MTSVLLESVIESDERADLRQFSRILQLNEKGYLLRNDILQAFADYCRNQQRPVPPPDESGLSKLVFYTQEIIVDNESLCWIIRPKIAQQEVCRLLVEDLTIVPMTIQELLDLRDRLVNHYHPNEGDVFEIDVRPFYDYSPVIRDAKNIGKGVEFLNRYMSSKLFQDPRQWQQNLFNFLQIHRYNGYQLLINERIRSPQHLSEQVKQALVVLSDRAPAEAYSEFRFELQNLGFEPGWGNTVARVRDTLEILDQLLDSPDHQVLEAFVSRIPMLFRIALISPHGWFGQEGVLGRPDTGGQVVYILDQVKSLEKQMREDLELAGLGVLEARPKIIVLTRLIPNAEGTLCNQRLEKIYGTNDAWILRVPFREFNPKVTQNWISRFEIWPYLETFAIDAERELLAEFGHVPDLIIGNYSDGNLVAFLLSRRLKVTQCNIAHALEKSKYLFSNLYWQDLEDKYHFSLQFTADLIAMNAANFIISSTYQEIVGTPDSIGQYESYQSFTMPDLYHVVNGIELFSPKFNVVPPGVNEQVYFPYYHYTERLEGDRQRLEELLFTLEDPQQIYGYLEAPEKRPLFSMARLDRIKNLTGLAEAFGRSKALQERCNLILVAGKLRTADSSDREEIAEIEKLYQIIHQYNLHGKIRWLGIRLPKADSGEIYRIIADRQGIFVQPALFEAFGLTILEAMISGLPTFGTRFGGPLEIIQDGVNGFYINPTHLEEMAETIVRFLEACDRDPQEWQRISKAGIERVYSTYTWKIHCTRLLSLAKIYGFWNFSSQENREDMMRYMEALFHLLYKPRAQALLAEHLQR

SEQ ID NO: 1300 - protein, 808 aa, Artificial Sequence
  engineered sucrose synthase encoded in plasmid pA35908
MTCVLLKAVVESDERADLRQFSRILQLGEKRYLLRNDILDAFADYCRDQERPVPPPSESRLSKLVFYTQEIIVDNESLCWIVRPRIAQQEVCRLLVEDLTIVPMTIPELLDLRDRLVNHYHPNEGDVFEIDVQPFYDYSPIIRDAKNIGKGVEFLNRYLSSKLFQDPRQWQQNLFNFLRIHRYNGYQLLINERIRSPQHLSEQVKQALVVLSDRPPTEAYSEFRFELQNLGFEPGWGNTVARVRDTLEILDQLLDSPDHQVLEAFVSRIPMLFRIALISPHGWFGQEGVLGRPDTGGQVVYILDQVKSLEKQMREDLELAGLGVLEAQPKIIVLTRLIPNAEGTLCNQRLEKIYGTNDAWILRVPFREFNPKVTQNWISRFEIWPYLETFAIDAERELRAEFGHVPDLIIGNYSDGNLVAFLLARRLKVTQCNIAHALEKSKYLFSNLYWQDLEDKYHFSLQFTADLIAMNAANFIISSTYQEIVGTPDSIGQYESYQSFTMPDLYHVVNGIELFSPKFNVVPPGVNEQVYFPYYHYTERLEGDRQRLEELLFTLEDPEQIYGKLDAPSKRPLFSMARLDRIKNLTGLAECFGRSKALQERCNLILVAGKLRTEDSSDREEIAEIEKLYQIIHEYNLHGKIRWLGIRLPKADSGEIYRIIADRQGIFVQPALFEAFGLTILEAMISGLPTFGTRFGGPLEIIQDGVNGFYINPTHLEEMAETIVRFIEACDRDPQEWQRISKAGIERVYSTYTWKIHTSRLLSLAKIYGFWNFSSQENREDMMRYMEALFHLLYKPRAQALLAEHLQR

SEQ ID NO: 1301 - protein, 808 aa, Artificial Sequence
  engineered sucrose synthase encoded in plasmid pA35909
MTCVLLKAVVESDERADLRQFSRILQLGEKRYLLRNDILDAFADYCRDQERPVPPPSESRLSKLVFYTQEIIVDNESLCWIVRPRIAQQEVCRLLVEDLTIVPMTIPELLDLRDRLVNHYHPNEGDVFEIDVQPFYDYSPIIRDAKNIGKGVEFLNRYLSSKLFQDPRQWQQNLFNFLRIHRYNGYQLLINERIRSPQHLSEQVKQALVVLSDRPPTEAYSEFRFELQNLGFEPGWGNTVARVRDTLEILDQLLDSPDHQVLEAFVSRIPMLFRIALISPHGWFGQEGVLGRPDTGGQVVYILDQVKSLEKQMREDLELAGLGVLEAQPKIIVLTRLIPNAEGTLCNQRLEKIYGTNDAWILRVPFREFNPKVTQNWISRFEIWPYLETFAIDAERELRAEFGHVPDLIIGNYSDGNLVAFLLARRLKVTQCNIAHALEKSKYLFSNLYWQDLEDKYHFSLQFTADLIAMNAANFIISSTYQEIVGTPDSIGQYESYQSFTMPDLYHVVNGIELFSPKFNVVPPGVNEQVYFPYYHYTERLEGDRQRLEELLFTLEDPQQIYGYLEAPNKRPLFSMARLDRIKNLTGLAEAFGRSKALQERCNLILVAGKLRTEDSSDREERAEIEKLYQIIHEYNLHGKIRWLGIRLPKNDSGEIYRIIADRQGIFVQPALFEAFGLTILEAMISGLPTFGTRFGGPLEIIQDGVNGFYINPTHLEEMAETIVRFIEACDRDPQEWYRISQRGIQRVYSTYTWKIHCSRLLSLARIYGFWNFISQENREDMMRYMEALFHLLYKPRAQQLLAEHLQR

SEQ ID NO: 1302 - protein, 808 aa, Artificial Sequence
  engineered sucrose synthase encoded in plasmid pA35910
MTCVLLKAVVESDERADLRQFSRILQLGEKRYLLRNDILDAFADYCRDQERPVPPPSESRLSKLVFYTQEIIVDNESLCWIVRPRIAQQEVCRLLVEDLTIVPMTIPELLDLRDRLVNHYHPNEGDVFEIDVQPFYDYSPIIRDAKNIGKGVEFLNRYLSSKLFQDPRQWQQNLFNFLRIHRYNGYQLLINERIRSPQHLSEQVKQALVVLSDRPPTEAYSEFRFELQNLGFEPGWGNTVARVRDTLEILDQLLDSPDHQVLEAFVSRIPMLFRIALISPHGWFGQEGVLGRPDTGGQVVYILDQVKSLEKQMREDLELAGLGVLEAQPKIIVLTRLIPNAEGTLCNQRLEKIYGTNDAWILRVPFREFNPKVTQNWISRFEIWPYLETFAIDAERELRAEFGHVPDLIIGNYSDGNLVAFLLARRLKVTQCNIAHALEKSKYLFSNLYWQDLEDKYHFSLQFTADLIAMNAANFIISSTYQEIVGTPDSIGQYESYQSFTMPDLYHVVNGIELFSPKFNVVPPGVNEQVYFPYYHYTERLEGDRQRLEELLFTLEDPSQIYGHLEDPQKRPLFSMARLDRIKNLTGLAEAFGRSKALQERCNLILVAGKLRTEDSSDREEIAEIEKLYQIIHEYNLHGKIRWLGIRLPKADSGEIYRIIADHQGIFVQPALFEAFGLTILEAMITGLPTFGTRFGGPLEIIQDGVNGFYINPTHLEEMAETIVRFIEACDRDPQEWQRISKASIERVYSTYTWKIHCTRLLSLARIYGFWNFSSQENREDMMRYMEALFHLLYKPRAQKLLAEHLQR

SEQ ID NO: 1303 - protein, 808 aa, Artificial Sequence
  engineered sucrose synthase encoded in plasmid pA35911
MTCVLLKAVVESDERADLRQFSRILQLGEKRYLLRNDILDAFADYCRDQERPVPPPSESRLSKLVFYTQEIIVDNESLCWIVRPRIAQQEVCRLLVEDLTIVPMTIPELLDLRDRLVNHYHPNEGDVFEIDVQPFYDYSPIIRDAKNIGKGVEFLNRYLSSKLFQDPRQWQQNLFNFLRIHRYNGYQLLINERIRSPQHLSEQVKQALVVLSDRPPTEAYSEFRFELQNLGFEPGWGNTVARVRDTLEILDQLLDSPDHQVLEAFVSRIPMLFRIALISPHGWFGQEGVLGRPDTGGQVVYILDQVKSLEKQMREDLELAGLGVLEAQPKIIVLTRLIPNAEGTLCNQRLEKIYGTNDAWILRVPFREFNPKVTQNWISRFEIWPYLETFAIDAERELRAEFGHVPDLIIGNYSDGNLVAFLLARRLKVTQCNIAHALEKSKYLFSNLYWQDLEDKYHFSLQFTADLIAMNAANFIISSTYQEIVGTPDSIGQYESYQSFTMPDLYHVVNGIELFSPKFNVVPPGVNEQVYFPYYHQTDRLEGDRQRLEELLFTLEDPEQIYGKLEAPNKRPLFSMARLDRIKNLTGLAEAFGRSKALQERCNLILVAGKLRTEDSSDREEIDEIEKLYQIIHQYNLHGKIRWLGIRLPKGDSGEIYRVIADRQGIFVQPALFEAFGLTILEAMISGLPTFGTRFGGPLEIIQDQVNGFYINPTHLEEMAETIVRFIEACDRDPQEWQRISKAGIERVYSTYTWKIHTSRLLSLAKIYGFWNFSSQENREDMMRYMEALFHLLYKPRAQRLLAEHLQR

SEQ ID NO: 1304 - protein, 808 aa, Artificial Sequence
  engineered sucrose synthase encoded in plasmid pA35912
MTCVLLKAVVESDERADLRQFSRILQLGEKRYLLRNDILDAFADYCRDQERPVPPPSESRLSKLVFYTQEIIVDNESLCWIVRPRIAQQEVCRLLVEDLTIVPMTIPELLDLRDRLVNHYHPNEGDVFEIDVQPFYDYSPIIRDAKNIGKGVEFLNRYLSSKLFQDPRQWQQNLFNFLRIHRYNGYQLLINERIRSPQHLSEQVKQALVVLSDRPPTEAYSEFRFELQNLGFEPGWGNTVARVRDTLEILDQLLDSPDHQVLEAFVSRIPMLFRIALISPHGWFGQEGVLGRPDTGGQVVYILDQVKSLEKQMREDLELAGLGVLEAQPKIIVLTRLIPNAEGTLCNQRLEKIYGTNDAWILRVPFREFNPKVTQNWISRFEIWPYLETFAIDAERELRAEFGHVPDLIIGNYSDGNLVAFLLARRLKVTQCNIAHALEKSKYLFSNLYWQDLEDKYHFSLQFTADLIAMNAANFIISSTYQEIVGTPDSIGQYESYQSFTMPDLYHVVNGIELFSPKFNVVPPGVNEQVYFPYTHYTERLEGDRQRLEELLFTLEDPQQIFGKLEAPNKRPLFSMARLDRIKNLTGLAECFGRSKALQEQCNLILVAGKLRTADSSDREEIAEIEKLYQIIHEYNLHGKIRWLGIRLPKADSGEIYRIIADRQGIFVQPALFEAFGLTILEAMISGLPTFGTRFGGPLEIIQDGKNGFYINPTHLEEMAETIVRFIEACNRDPQYWQRISQAGIERVYSTYTWKIHCSRLLSLAKIYGFWNFSSQENREDMMRYMEALFHLLYKPRAQALLAEHLQR

SEQ ID NO: 1305 - protein, 808 aa, Artificial Sequence
  engineered sucrose synthase encoded in plasmid pA35913
MTCVLLKAVVESDERADLRQFSRILQLGEKRYLLRNDILDAFADYCRDQERPVPPPSESRLSKLVFYTQEIIVDNESLCWIVRPRIAQQEVCRLLVEDLTIVPMTIPELLDLRDRLVNHYHPNEGDVFEIDVQPFYDYSPIIRDAKNIGKGVEFLNRYLSSKLFQDPRQWQQNLFNFLRIHRYNGYQLLINERIRSPQHLSEQVKQALVVLSDRPPTEAYSEFRFELQNLGFEPGWGNTVARVRDTLEILDQLLDSPDHQVLEAFVSRIPMLFRIALISPHGWFGQEGVLGRPDTGGQVVYILDQVKSLEKQMREDLELAGLGVLEAQPKIIVLTRLIPNAEGTLCNQRLEKIYGTNDAWILRVPFREFNPKVTQNWISRFEIWPYLETFAIDAERELRAEFGHVPDLIIGNYSDGNLVAFLLARRLKVTQCNIAHALEKSKYLFSNLYWQDLEDKYHFSLQFTADLIAMNAANFIISSTYQEIVGTPDSIGQYESYQSFTMPDLYHVVNGIELFSPKFNVVPPGVNEQVYFPYYHYTERLEGDRQRLEELLFTLEDPSQIYGYLDYPDKRPLFSMARLDRIKNLTGLAEAFGRSKALQERCNLILVAGKLRTEDSSDREEIAEIEKLYQIIHEYQLHGKIRWLGIRLPKADSGEIYRIIADRQGVFVQPALFEAFGLTILEAMISGLPTFGTRFGGPLEIIQDGVNGFYINPTHLEEMAETIVRFIEACDRDPQQWYRISQAGIQRVYSTYTWKIHCTRLLSLAKIYGFWNFSSQENREDMMRYMEALFHLLYKPRAQRLLAEHLQR

SEQ ID NO: 1306 - protein, 808 aa, Artificial Sequence
  engineered sucrose synthase encoded in plasmid pA35914
MTCVLLKAVVESDERADLRQFSRILQLGEKRYLLRNDILDAFADYCRDQERPVPPPSESRLSKLVFYTQEIIVDNESLCWIVRPRIAQQEVCRLLVEDLTIVPMTIPELLDLRDRLVNHYHPNEGDVFEIDVQPFYDYSPIIRDAKNIGKGVEFLNRYLSSKLFQDPRQWQQNLFNFLRIHRYNGYQLLINERIRSPQHLSEQVKQALVVLSDRPPTEAYSEFRFELQNLGFEPGWGNTVARVRDTLEILDQLLDSPDHQVLEAFVSRIPMLFRIALISPHGWFGQEGVLGRPDTGGQVVYILDQVKSLEKQMREDLELAGLGVLEAQPKIIVLTRLIPNAEGTLCNQRLEKIYGTNDAWILRVPFREFNPKVTQNWISRFEIWPYLETFAIDAERELRAEFGHVPDLIIGNYSDGNLVAFLLARRLKVTQCNIAHALEKSKYLFSNLYWQDLEDKYHFSLQFTADLIAMNAANFIISSTYQEIVGTPDSIGQYESYQSFTMPDLYHVVNGIELFSPKFNVVPPGVNEQVYFPYYHYTERLEGDRQRLEELLFTLEDPEQIYGKLDDPSKRPLFSMARLDRIKNLTGLAECFGRSKALQERCNLILVAGKLRTEDSSDREEIDEIEKLYQIIHEYNLHGKIRWLGIRLPKADSGEIYRIIADRQGIFVQPALFEAFGLTILEAMISGLPTFGTRFGGPLEIIQDGKNGFYINPTHLEEMAETIVRFIEACDRDPQEWERISKAGIERVYSTYTWKIHTSRLLSLAKIYGFWNFSSQENREDMMRYMEALFHLLYKPRAQRLLAEHLQR

SEQ ID NO: 1307 - protein, 808 aa, Artificial Sequence
  engineered sucrose synthase encoded in plasmid pA35915
MTCVLLKAVVESDERADLRQFSRILQLGEKRYLLRNDILDAFADYCRDQERPVPPPSESRLSKLVFYTQEIIVDNESLCWIVRPRIAQQEVCRLLVEDLTIVPMTIPELLDLRDRLVNHYHPNEGDVFEIDVQPFYDYSPIIRDAKNIGKGVEFLNRYLSSKLFQDPRQWQQNLFNFLRIHRYNGYQLLINERIRSPQHLSEQVKQALVVLSDRPPTEAYSEFRFELQNLGFEPGWGNTVARVRDTLEILDQLLDSPDHQVLEAFVSRIPMLFRIALISPHGWFGQEGVLGRPDTGGQVVYILDQVKSLEKQMREDLELAGLGVLEAQPKIIVLTRLIPNAEGTLCNQRLEKIYGTNDAWILRVPFREFNPKVTQNWISRFEIWPYLETFAIDAERELRAEFGHVPDLIIGNYSDGNLVAFLLARRLKVTQCNIAHALEKSKYLFSNLYWQDLEDKYHFSLQFTADLIAMNAANFIISSTYQEIVGTPDSIGQYESYQSFTMPDLYHVVNGIELFSPKFNVVPPGVNEQVYFPYTHYTERLEGDRQRLEELLFTLEDPSQIFGHLEAPEKRPLFSMARLDRIKNLTGLAEAFGRSKALQERCNLILVAGKLRTEDSSDREERAEIEKLYQIIHEYNLHGKIRWLGIRLPKADSGEIYRVIADRQGIFVQPALFEAFGLTILEAMISGLPTFGTRFGGPLEIIQDQVNGFYINPTHLEETAETILRFIEACDRDPQQWQRISKAGIQRVYSTYTWKIHTSRLLSLARIYGFWNFISQENREDMMRYMEALFHLLYKPRAQQLLAEHLQR

SEQ ID NO: 1308 - protein, 808 aa, Artificial Sequence
  engineered sucrose synthase encoded in plasmid pA35916
MTCVLLKAVVESDERADLRQFSRILQLGEKRYLLRNDILDAFADYCRDQERPVPPPSESRLSKLVFYTQEIIVDNESLCWIVRPRIAQQEVCRLLVEDLTIVPMTIPELLDLRDRLVNHYHPNEGDVFEIDVQPFYDYSPIIRDAKNIGKGVEFLNRYLSSKLFQDPRQWQQNLFNFLRIHRYNGYQLLINERIRSPQHLSEQVKQALVVLSDRPPTEAYSEFRFELQNLGFEPGWGNTVARVRDTLEILDQLLDSPDHQVLEAFVSRIPMLFRIALISPHGWFGQEGVLGRPDTGGQVVYILDQVKSLEKQMREDLELAGLGVLEAQPKIIVLTRLIPNAEGTLCNQRLEKIYGTNDAWILRVPFREFNPKVTQNWISRFEIWPYLETFAIDAERELRAEFGHVPDLIIGNYSDGNLVAFLLARRLKVTQCNIAHALEKSKYLFSNLYWQDLEDKYHFSLQFTADLIAMNAANFIISSTYQEIVGTPDSIGQYESYQSFTMPDLYHVVNGIELFSPKFNVVPPGVNEQVYFPYYHQTERLEGDRQRLEELLFTLEDPSQIYGYLQAPDKRPLFSMARLDRIKNLTGLAECFGRSKALQEQCNLILVAGKLRTEDSSDREEIAEIEKLYQIIHEYQLHGKIRWLGIRLPKADSGEIYRIIADHQGVFVQPALFEAFGLTILEAMISGLPTFGTRFGGPLEIIQDGVNGFYINPTHLEEMAETIVRFIEACDRDPEEWLRISQAGIERVYSTYTWKIHCSRLLSLAKIYGFWNFISQENREDMMRYMEALFHLLYKPRAQALLAEHLQR

SEQ ID NO: 1309 - protein, 808 aa, Artificial Sequence
  engineered sucrose synthase encoded in plasmid pA35917
MTCVLLKAVVESDERADLRQFSRILQLGEKRYLLRNDILDAFADYCRDQERPVPPPSESRLSKLVFYTQEIIVDNESLCWIVRPRIAQQEVCRLLVEDLTIVPMTIPELLDLRDRLVNHYHPNEGDVFEIDVQPFYDYSPIIRDAKNIGKGVEFLNRYLSSKLFQDPRQWQQNLFNFLRIHRYNGYQLLINERIRSPQHLSEQVKQALVVLSDRPPTEAYSEFRFELQNLGFEPGWGNTVARVRDTLEILDQLLDSPDHQVLEAFVSRIPMLFRIALISPHGWFGQEGVLGRPDTGGQVVYILDQVKSLEKQMREDLELAGLGVLEAQPKIIVLTRLIPNAEGTLCNQRLEKIYGTNDAWILRVPFREFNPKVTQNWISRFEIWPYLETFAIDAERELRAEFGHVPDLIIGNYSDGNLVAFLLARRLKVTQCNIAHALEKSKYLFSNLYWQDLEDKYHFSLQFTADLIAMNAANFIISSTYQEIVGTPDSIGQYESYQSFTMPDLYHVVNGIELFSPKFNVVPPGVNEQVYFPYYHYEERVESDRQRLEELLFTLEDPEQIFGKLDAPNKRPLFSMARLDRIKNLTGLAECFGRSKALQERCNLILVAGKLRTEDSSDYEEIAEIEKLYQIIHQYNLHGKIRWLGIRLPKGDSGEIYRVIADRQGIFVQPALFEAFGLTILEAMISGLPTFATRFGGPLEIIQDQVNGFYINPTHLEEMAETIVRFIEQCDRDPQEWQRISKAGIERVYSTYTWKIHTSRLLSLAKIYGFWNFSSQENREDMMRYMEALFHLLYKPRAQALLAEHLQR

SEQ ID NO: 1310 - protein, 808 aa, Artificial Sequence
  engineered sucrose synthase encoded in plasmid pA35919
MTCVLLKAVVESDERADLRQFSRILQLGEKRYLLRNDILDAFADYCRDQERPVPPPSESRLSKLVFYTQEIIVDNESLCWIVRPRIAQQEVCRLLVEDLTIVPMTIPELLDLRDRLVNHYHPNEGDVFEIDVQPFYDYSPIIRDAKNIGKGVEFLNRYLSSKLFQDPRQWQQNLFNFLRIHRYNGYQLLINERIRSPQHLSEQVKQALVVLSDRPPTEAYSEFRFELQNLGFEPGWGNTVARVRDTLEILDQLLDSPDHQVLEAFVSRIPMLFRIALISPHGWFGQEGVLGRPDTGGQVVYILDQVKSLEKQMREDLELAGLGVLEAQPKIIVLTRLIPNAEGTLCNQRLEKIYGTNDAWILRVPFREFNPKVTQNWISRFEIWPYLETFAIDAERELRAEFGHVPDLIIGNYSDGNLVAFLLARRLKVTQCNIAHALEKSKYLFSNLYWQDLEDKYHFSLQFTADLIAMNAANFIISSTYQEIVGTPDSIGQYESYQSFTMPDLYHVVNGIELFSPKFNVVPPGVNEQVYFPYTHTTNRLEGDRQRLEELLFTLEDPEQIYGKLEDLNKRPLFSMARLDRIKNLTGLAEAFGRSKALQERCNLILVAGKLRTEDSSDREEIDEIEKLYQIIHQYNLHGKIRWLGIRLPKNDSGEIYRVIADRQGIFVQPALFEAFGLTILEAMISGLPTFGTRFGGPLEIIQNQVNGFYINPTHLEEMAETIVRFIEACDRDPQEWQRLSQAGIERVYSTYTWKIHTSRLLSLAKIYGFWNFSSQENREDMMRYMEALFHLLYKPRAQALLAEHLQR

SEQ ID NO: 1311 - protein, 808 aa, Artificial Sequence
  engineered sucrose synthase encoded in plasmid pA35921
MTCVLLKAVVESDERADLRQFSRILQLGEKRYLLRNDILDAFADYCRDQERPVPPPSESRLSKLVFYTQEIIVDNESLCWIVRPRIAQQEVCRLLVEDLTIVPMTIPELLDLRDRLVNHYHPNEGDVFEIDVQPFYDYSPIIRDAKNIGKGVEFLNRYLSSKLFQDPRQWQQNLFNFLRIHRYNGYQLLINERIRSPQHLSEQVKQALVVLSDRPPTEAYSEFRFELQNLGFEPGWGNTVARVRDTLEILDQLLDSPDHQVLEAFVSRIPMLFRIALISPHGWFGQEGVLGRPDTGGQVVYILDQVKSLEKQMREDLELAGLGVLEAQPKIIVLTRLIPNAEGTLCNQRLEKIYGTNDAWILRVPFREFNPKVTQNWISRFEIWPYLETFAIDAERELRAEFGHVPDLIIGNYSDGNLVAFLLARRLKVTQCNIAHALEKSKYLFSNLYWQDLEDKYHFSLQFTADLIAMNAANFIISSTYQEIVGTPDSIGQYESYQSFTMPDLYHVVNGIELFSPKFNVVPPGVNEQVYFPYYHYEERVESDRQRLEELLFTLEDPEQIFGKLDDPEKRPLFSMARLDRIKNLTGLAECFGRSPALQERCNLILVAGKLRTEDSSDYEEIDEIEKLYQIIHEYNLHGKIRWLGIRLPKGDSGEIYRVIADRQGIFVQPALFEAFGLTILEAMISGLPTFGTRFGGPLEIIQNQVNGFYINPTHLEEMAETIVRFIEQCDRDPQEWERISKASIERVYSTYTWKIHCSRLLSLAKIYGFWNFSSQENREDMMRYMEALFHLLYKPRAQRLLAEHLQR

SEQ ID NO: 1312 - protein, 808 aa, Artificial Sequence
  engineered sucrose synthase encoded in plasmid pA35922
MTCVLLKAVVESDERADLRQFSRILQLGEKRYLLRNDILDAFADYCRDQERPVPPPSESRLSKLVFYTQEIIVDNESLCWIVRPRIAQQEVCRLLVEDLTIVPMTIPELLDLRDRLVNHYHPNEGDVFEIDVQPFYDYSPIIRDAKNIGKGVEFLNRYLSSKLFQDPRQWQQNLFNFLRIHRYNGYQLLINERIRSPQHLSEQVKQALVVLSDRPPTEAYSEFRFELQNLGFEPGWGNTVARVRDTLEILDQLLDSPDHQVLEAFVSRIPMLFRIALISPHGWFGQEGVLGRPDTGGQVVYILDQVKSLEKQMREDLELAGLGVLEAQPKIIVLTRLIPNAEGTLCNQRLEKIYGTNDAWILRVPFREFNPKVTQNWISRFEIWPYLETFAIDAERELRAEFGHVPDLIIGNYSDGNLVAFLLARRLKVTQCNIAHALEKSKYLFSNLYWQDLEDKYHFSLQFTADLIAMNAANFIISSTYQEIVGTPDSIGQYESYQSFTMPDLYHVVNGIELFSPKFNVVPPGVNEQVYFPYYHQTERLEGDRQRLEELLFTLEDPSQIFGYLDAPSKRPLFSMARLDRIKNLTGLAEAFGRSQALQERCNLILVAGKLRTEDSSDSEERAEIEKLYQIIHEYNLHGKIRWLGIRLPKNDSGEIYRIIADRQGVFVQPALFEAFGLTILEAMISGLPTFGTQFGGPLEIIQDGVNGFYINPTHLEEMAETIVRFLEACDHDPEEWYRISKAAIQRVYSTYTWKIHTSKLLSLARIYGFWNFISQENREDMMRYMEALFHLLYKPRAQQLLAEHLQR

SEQ ID NO: 1313 - protein, 808 aa, Artificial Sequence
  engineered sucrose synthase encoded in plasmid pA35923
MTCVLLKAVVESDERADLRQFSRILQLGEKRYLLRNDILDAFADYCRDQERPVPPPSESRLSKLVFYTQEIIVDNESLCWIVRPRIAQQEVCRLLVEDLTIVPMTIPELLDLRDRLVNHYHPNEGDVFEIDVQPFYDYSPIIRDAKNIGKGVEFLNRYLSSKLFQDPRQWQQNLFNFLRIHRYNGYQLLINERIRSPQHLSEQVKQALVVLSDRPPTEAYSEFRFELQNLGFEPGWGNTVARVRDTLEILDQLLDSPDHQVLEAFVSRIPMLFRIALISPHGWFGQEGVLGRPDTGGQVVYILDQVKSLEKQMREDLELAGLGVLEAQPKIIVLTRLIPNAEGTLCNQRLEKIYGTNDAWILRVPFREFNPKVTQNWISRFEIWPYLETFAIDAERELRAEFGHVPDLIIGNYSDGNLVAFLLARRLKVTQCNIAHALEKSKYLFSNLYWQDLEDKYHFSLQFTADLIAMNAANFIISSTYQEIVGTPDSIGQYESYQSFTMPDLYHVVNGIELFSPKFNVVPPGVNEQVYFPYTHQQERVESDRQRLEELLFTLEDPEQIYGHLEDPNKRPLFSMARLDRIKNLTGLAEAFGRSQALQERCNLILVAGKLRTEDSSDREEIAEIEKLYQIIEEYNLHGKIRWLGIRLPKADSGEIYRIIADRQGIFVQPALFEAFGLTILEAMISGLPTFATRFGGPLEIIQDGKNGFYINPTHLEEMAETIVRFIEQCDRDPQYWERISKAGIQRVYSTYTWKIHTSRLLSLAKIYGFWNFSSQENREDMMRYMEALFHLLYKPRAQRLLAEHLQR

SEQ ID NO: 1314 - protein, 808 aa, Artificial Sequence
  engineered sucrose synthase encoded in plasmid pA35924
MTCVLLKAVVESDERADLRQFSRILQLGEKRYLLRNDILDAFADYCRDQERPVPPPSESRLSKLVFYTQEIIVDNESLCWIVRPRIAQQEVCRLLVEDLTIVPMTIPELLDLRDRLVNHYHPNEGDVFEIDVQPFYDYSPIIRDAKNIGKGVEFLNRYLSSKLFQDPRQWQQNLFNFLRIHRYNGYQLLINERIRSPQHLSEQVKQALVVLSDRPPTEAYSEFRFELQNLGFEPGWGNTVARVRDTLEILDQLLDSPDHQVLEAFVSRIPMLFRIALISPHGWFGQEGVLGRPDTGGQVVYILDQVKSLEKQMREDLELAGLGVLEAQPKIIVLTRLIPNAEGTLCNQRLEKIYGTNDAWILRVPFREFNPKVTQNWISRFEIWPYLETFAIDAERELRAEFGHVPDLIIGNYSDGNLVAFLLARRLKVTQCNIAHALEKSKYLFSNLYWQDLEDKYHFSLQFTADLIAMNAANFIISSTYQEIVGTPDSIGQYESYQSFTMPDLYHVVNGIELFSPKFNVVPPGVNEQVYFPYTHYTERLEGDRQRLEELLFTLEDPSQIYGKLDNQNKRPLFSMARLDRIKNLTGLAECFGRSKALQERCNLILVAGKLRTEDSSDREERDEIEKLYQIIHEYNLHGKIRWLGIRLPKADSGEIYRIIADHQGIFVQPALFEAFGLTILEAMISGLPTFGTRFGGPLEIIQDGVNGFYINPTHLEEMAETIVRFIEACDRDPQQWQRISQAAIERVYSTYTWKIHCTRLLSLARIYGFWNFISQENREDMMRYMEALFHLLYKPRAQKLLAEHLQR

SEQ ID NO: 1315 - protein, 808 aa, Artificial Sequence
  engineered sucrose synthase encoded in plasmid pA35925
MTCVLLKAVVESDERADLRQFSRILQLGEKRYLLRNDILDAFADYCRDQERPVPPPSESRLSKLVFYTQEIIVDNESLCWIVRPRIAQQEVCRLLVEDLTIVPMTIPELLDLRDRLVNHYHPNEGDVFEIDVQPFYDYSPIIRDAKNIGKGVEFLNRYLSSKLFQDPRQWQQNLFNFLRIHRYNGYQLLINERIRSPQHLSEQVKQALVVLSDRPPTEAYSEFRFELQNLGFEPGWGNTVARVRDTLEILDQLLDSPDHQVLEAFVSRIPMLFRIALISPHGWFGQEGVLGRPDTGGQVVYILDQVKSLEKQMREDLELAGLGVLEAQPKIIVLTRLIPNAEGTLCNQRLEKIYGTNDAWILRVPFREFNPKVTQNWISRFEIWPYLETFAIDAERELRAEFGHVPDLIIGNYSDGNLVAFLLARRLKVTQCNIAHALEKSKYLFSNLYWQDLEDKYHFSLQFTADLIAMNAANFIISSTYQEIVGTPDSIGQYESYQSFTMPDLYHVVNGIELFSPKFNVVPPGVNEQVYFPYYHYEERLESDRERLEELLFTLEDPEQIFGKLDDPSKRPLFSMARLDRIKNLTGLAECFGRSQALQERCNLILVAGKLRTEDSSDREEIDEIEKLYQIIHQYNLHGKIRWLGIRLPKADSGEIYRVIADRQGIFVQPALFEAFGLTILEAMISGLPTFATRFGGPLEIIQDGVNGFYINPTHLEEMAETIVRFIEACDQDPQQWERISKRGIDRVYSTYTWKIHTTRLLSLAKIYGFWNFTSQENREDMMRYMEALFHLLYKPRAQRLLAEHLQR

SEQ ID NO: 1316 - protein, 808 aa, Artificial Sequence
  engineered sucrose synthase encoded in plasmid pA35926
MTSVLLKSVVESDERADLRQFSRILQLGEKRYLLRNDILDAFADYCRNQGRPVPPPSESRLSKLVFYTQEIIVDNESLCWIIRPRIAQQEVCRLLVEDLTIVPMTIPELLDLRDRLVNHYHPNEGDVFEIDVQPFYDYSPIIRDAKNIGKGVEFLNRYLSSKLFQDPRQWQQNLFNFLQIHRYNGYQLLINERIRSPQHLSEQVKQALVTLSDRAPAEAYSEFRFELQNLGFEPGWGNTVARVRDTLEILDQLLDSPDHQVLEAFVSRIPMLFRIALISPHGWFGQEGVLGRPDTGGQVVYILDQVKSLEKQMREDLELAGLGVLEAQPKIIVLTRLIPNAEGTLCNQRLEKIYGTNNAWILRVPFREFNPKVTQNWISRFEIWPYLETFAIDAERELRAEFGHVPDLIIGNYSDGNLVAFLLARRLKVTQCNIAHALEKSKYLFSNLYWQDLEDKYHFSLQFTADLIAMNAANFIISSTYQEIVGTPDSIGQYESYQSFTMPDLYHVVNGIELFSPKFNVVPPGVNEQVYFPYYHYTERLEGDRQRLEELLFTLEDPQQIYGYLEAPEKRPLFSMARLDRIKNLTGLAEAFGRSKALQERCNLILVAGKLRTADSSDREEIAEIEKLYQIIHQYNLHGKIRWLGIRLPKADSGEIYRIIADRQGIFVQPALFEAFGLTILEAMISGLPTFGTRFGGPLEIIQDGVNGFYINPTHLEEMAETIVRFLEACDRDPQEWQRISKAGIERVYSTYTWKIHCTRLLSLAKIYGFWNFSSQENREDMMRYMEALFHLLYKPRAQALLAEHLQR

SEQ ID NO: 1317 - protein, 808 aa, Artificial Sequence
  engineered sucrose synthase encoded in plasmid pA35927
MTSVLLKAVVESDERADLRQFSRILQLGEKRYLLRNDILDAFADYCRNQERPVPPPSESRLSKLVFYTQEIIVDNESLCWIIRPRIAQQEVCRLLVEDLTIVPMTIPELLDLRDRLVNHYHPNEGDVFEIDVQPFYDYSPIIRDAKNIGKGVEFLNRYLSSKLFQDPRQWQQALFNFLRIHRYNGYQLLINERIRSPQQLSEQVKQALVVLSDRPPTEAYEEFRFELQNLGFEPGWGNTVARVRDTLEILDQLLDSPDHQVLEAFVSRIPMLFRIALISPHGWFGQEGVLGRPDTGGQVVYILDQVKSLEKQMQEDLELAGLGVLEAQPKIIVLTRLIPNSEGTLCNERLEKIYGTNNAWILRVPFREFNPKVTQNWISRFEIWPYLETFAIDAERELRAEFGHVPDLIIGNYSDGNLVAFLLARRMKVTQCNIAHALEKSKYLFSNLYWQDLEDKYHFSLQFTADLIAMNAANFIISSTYQEIVGTPDSIGQYESYQSFTMPDLYHVVNGIELFSPKFNVVPPGVNEQVYFPYYHYTERLEGDRQRLEELLFTLEDPQQIYGYLEAPEKRPLFSMARLDRIKNLTGLAEAFGRSKALQERCNLILVAGKLRTADSSDREEIAEIEKLYQIIHQYNLHGKIRWLGIRLPKADSGEIYRIIADRQGIFVQPALFEAFGLTILEAMISGLPTFGTRFGGPLEIIQDGVNGFYINPTHLEEMAETIVRFLEACDRDPQEWQRISKAGIERVYSTYTWKIHCTRLLSLAKIYGFWNFSSQENREDMMRYMEALFHLLYKPRAQALLAEHLQR

SEQ ID NO: 1318 - protein, 808 aa, Artificial Sequence
  engineered sucrose synthase encoded in plasmid pA35928
MTSVLLKSVVESDERADLRQFSRILQTGEKGYLLRNDILNAFADYCRNQGRPVPPPSESRLSKLVFYTQEIIVDNESLCWIIRPRIAQQEVYRLLVEDLTIVPMTIPELLDLRDRLVNHYHPNEGDVFEIDVQPFYDYSPIIRDAKNIGKGVEFLNRYLSSKLFQDPRQWQQNLFNFLQIHRYNGYQLLINERIRSPQHLSEQVKQALVTLSDRAPAEAYSEFRFELQNLGFEPGWGNTVARVRDTLEILDQLLDSPDHQVLEAFVSRIPMLFRIALISPHGWFGQEGVLGRPDTGGQVVYILDQVKSLEKQMREDLELAGLGVLEARPKIIVLTRLIPNAEGTLCNQRLEKIYGTNDAWILRVPFREFNPKVTQNWISRFEIWPYLETFAIDAERELRAEFGHVPDLIIGNYSDGNLVAFLLARRLKVTQCNIAHALEKSKYLFSNLYWQDLEDKYHFSLQFTADLIAMNAANFIISSTYQEIVGTPDSIGQYESYQSFTMPDLYHVVNGIELFSPKFNVVPPGVNEQVYFPYYHYTERLEGDRQRLEELLFTLEDPQQIYGYLEAPEKRPLFSMARLDRIKNLTGLAEAFGRSKALQERCNLILVAGKLRTADSSDREEIAEIEKLYQIIHQYNLHGKIRWLGIRLPKADSGEIYRIIADRQGIFVQPALFEAFGLTILEAMISGLPTFGTRFGGPLEIIQDGVNGFYINPTHLEEMAETIVRFLEACDRDPQEWQRISKAGIERVYSTYTWKIHCTRLLSLAKIYGFWNFSSQENREDMMRYMEALFHLLYKPRAQALLAEHLQR

SEQ ID NO: 1319 - protein, 808 aa, Artificial Sequence
  engineered sucrose synthase encoded in plasmid pA35929
MTSVLLKAVVESDERADLRQFSRILQLGEKRYLLRNDILGAFADYCRNQGRPVPPPSSSRLSKLVFYTQEIIVDNESLCWIIRPRIAQQEVCRLLVEDLTIVPMTIPELLDLRDRLVNHYHPNEGDVFEIDVQPFYDYSPIIRDAKNIGKGVEFLNRYLSSKLFQDPRQWQQNLFNFLQIHRYNGYQLLINERIRSPQHLSEQVKQALVVLSDRAPDEAYSEFRFELQNLGFEPGWGNTVARVRDTLEILDQLLDSPDHQVLEAFVSRIPMLFRIALISPHGWFGQEGVLGRPDTGGQVVYILDQVKSLEKQMQEDLELAGLGVLEAQPKIIVLTRLIPNCEGTLCNQRLEKIYGTNNAWILRVPFREFNPKVTQNWITRFEIWPYLETFAIDAERELRAEFGHVPDLIIGNYSDGNLVAFLLARRMKVTQCNIAHALEKSKYLFSNLYWQDLEDKYHFSLQFTADLIAMNAANFIISSTYQEIVGTPDSIGQYESYQSFTMPDLYHVVNGIELFSPKFNVVPPGVNEQVYFPYYHYTERLEGDRQRLEELLFTLEDPQQIYGYLEAPEKRPLFSMARLDRIKNLTGLAEAFGRSKALQERCNLILVAGKLRTADSSDREEIAEIEKLYQIIHQYNLHGKIRWLGIRLPKADSGEIYRIIADRQGIFVQPALFEAFGLTILEAMISGLPTFGTRFGGPLEIIQDGVNGFYINPTHLEEMAETIVRFLEACDRDPQEWQRISKAGIERVYSTYTWKIHCTRLLSLAKIYGFWNFSSQENREDMMRYMEALFHLLYKPRAQALLAEHLQR

SEQ ID NO: 1320 - protein, 808 aa, Artificial Sequence
  engineered sucrose synthase encoded in plasmid pA35930
MTSVLLKAVVESDERADLRQFSRILQTGEKRYLLRNDILDAFADYCRNQGRPVPPPSESRLSKLVFYTQEIIVDNESLCWIIRPRIAQQEVCRLLVEDLTIVPMTIPELLDLRDRLVNHYHPNEGDVFEIDVQPFYDYSPIIRDAKNIGKGVEFLNRYLSSKLFQDPRQWQQTLFNFLRIHRYNGYQLLINERIRSPQHLSEQVKQALVTLSDRAPAEPYSEFRFELQNLGFEPGWGNTVARVRDTLEILDQLMDSPDHQVLEAFVSRIPMLFRIALISPHGWFGQEGVLGRPDTGGQVVYILDQVKSLEKQMQEDLELAGLGVLEAQPKIIVLTRLIPNAEGTLCNQRLEKIYGTNDAWILRVPFREFNPKVTQNWISRFEIWPYLETFAIDAETELRAEFGHVPDLIIGNYSDGNLVAFLLARRLKVTQCNIAHALEKSKYLFSNLYWQDLEDKYHFSLQFTADLIAMNAANFIISSTYQEIVGTPDSIGQYESYQSFTMPDLYHVVNGIELFSPKFNVVPPGVNEQVYFPYYHYTERLEGDRQRLEELLFTLEDPQQIYGYLEAPEKRPLFSMARLDRIKNLTGLAEAFGRSKALQERCNLILVAGKLRTADSSDREEIAEIEKLYQIIHQYNLHGKIRWLGIRLPKADSGEIYRIIADRQGIFVQPALFEAFGLTILEAMISGLPTFGTRFGGPLEIIQDGVNGFYINPTHLEEMAETIVRFLEACDRDPQEWQRISKAGIERVYSTYTWKIHCTRLLSLAKIYGFWNFSSQENREDMMRYMEALFHLLYKPRAQALLAEHLQR

SEQ ID NO: 1321 - protein, 808 aa, Artificial Sequence
  engineered sucrose synthase encoded in plasmid pA35931
MTSVLLKAVVESEERADLRQFSRILQLGEKRYLLRNDILDAFADYCRNQERPVPPPSESRLSKLVFYTQEIIFDNESLCWIIRPRIAQQEVCRLLVEDLTIVPMTIPELLDLRDRLVNHYHPNEGDVFEIDVQPFYDYSPIIRDAKNIGKGVEFLNRYLSSKLFQDPRQWQQNLFNFLQIHRYNGYQLLINERIRSPQHLSEQVKQALVTLSDRAPAAAYSEFRFELQNLGFEPGWGNTVARVRDTLEILDQLLDSPDHQVLEAFVSRIPMLFRIALISPHGWFGQEGVLGRPDTGGQVVYILDQVKSLEKQLREDLELAGLGVLEAQPKIIVLTRLIPNAEGTLCNQRLEKIYGTNDAWILRVPFREFNPKVTQNWISRFEIWPYLETFAIDAERELRAEFGHVPDLIIGNYSDGNLVAFLLARRLKVTQCNIAHALEKSKYLFSNLYWQDLEDKYHFSLQFTADLIAMNAANFIISSTYQEIVGTPDSIGQYESYQSFTMPDLYHVVNGIELFSPKFNVVPPGVNEQVYFPYYHYTERLEGDRQRLEELLFTLEDPQQIYGYLEAPEKRPLFSMARLDRIKNLTGLAEAFGRSKALQERCNLILVAGKLRTADSSDREEIAEIEKLYQIIHQYNLHGKIRWLGIRLPKADSGEIYRIIADRQGIFVQPALFEAFGLTILEAMISGLPTFGTRFGGPLEIIQDGVNGFYINPTHLEEMAETIVRFLEACDRDPQEWQRISKAGIERVYSTYTWKIHCTRLLSLAKIYGFWNFSSQENREDMMRYMEALFHLLYKPRAQALLAEHLQR

SEQ ID NO: 1322 - protein, 808 aa, Artificial Sequence
  engineered sucrose synthase encoded in plasmid pA35932
MTSVLLKSVVESDERADLRQFSRILQLGEKGYLLRNDILDAFADYCRNQGRPVPPPSESRLSKLVFYTQEIIVDNESLCWIIRPRIAQQEVCRLLVEDLTIVPMTIPELLDLRDRLVNHYHPNEGDVFEIDVQPFYDYSPIIRDAKNIGKGVEFLNRYLSSKLFQDPRQWQQNLFNFLQIHRYNGYQLLINERIRSPQHLSEQVKQALVTLSDRAPAEPYSEFRFELQNLGFEPGWGNTVARVRDTLEILDQLLDSPDHQVLEAFVSRIPMLFRIALISPHGWFGQEGVLGRPDTGGQVVYILDQVKSLEKQMQEDLELAGLGVLEARPKIIVLTRLIPNAEGTLCNQRLEKIYGTNNAWILRVPFREFNPKVTQNWISRFEIWPYLETFAIDAERELRAEFGHVPDLIIGNYSDGNLVAFLLARRMKVTQCNIAHALEKSKYLFSNLYWQDLEDKYHFSLQFTADLIAMNAANFIISSTYQEIVGTPDSIGQYESYQSFTMPDLYHVVNGIELFSPKFNVVPPGVNEQVYFPYYHYTERLEGDRQRLEELLFTLEDPQQIYGYLEAPEKRPLFSMARLDRIKNLTGLAEAFGRSKALQERCNLILVAGKLRTADSSDREEIAEIEKLYQIIHQYNLHGKIRWLGIRLPKADSGEIYRIIADRQGIFVQPALFEAFGLTILEAMISGLPTFGTRFGGPLEIIQDGVNGFYINPTHLEEMAETIVRFLEACDRDPQEWQRISKAGIERVYSTYTWKIHCTRLLSLAKIYGFWNFSSQENREDMMRYMEALFHLLYKPRAQALLAEHLQR

SEQ ID NO: 1323 - protein, 808 aa, Artificial Sequence
  engineered sucrose synthase encoded in plasmid pA35933
MTSVLLKAVVESDERADLRQFSRILQLGEKRYLLRNDILNAFADYCRNQGRPVPPPDSSRLSKLVFYTQEIIVDNESLCWIIRPRIAQQEVCRLLVEDLTIVPMTIPELLDLRDRLVNHYHPNEGDVFEIDVQPFYDYSPIIRDAKNIGKGVEFLNRYLSSKLFQDPRQWQQTLFNFLRIHRYNGYQLLINERIRSPQHLSEQVKQALVFLSDRAPDEAYSEFRFELQNLGFEPGWGNTAARVRDTLEILDQLLDSPDHQVLEAFVSRIPMLFRIALISPHGWFGQEGVLGRPDTGGQVVYILDQAKSLEKQMQEDLELAGLGVLEAQPKIIVLTRLIPNSEGTLCNQRLEKIYGTNNAWILRVPFREFNPKVTQNWISRFEIWPYLETFAIDAETELRAEFGHVPDLIIGNYSDGNLVAFLLARRMKVTQCNIAHALEKSKYLFSNLYWQDLEDKYHFSLQFTADLIAMNAANFIISSTYQEIVGTPDSIGQYESYQSFTMPDLYHVVNGIELFSPKFNVVPPGVNEQVYFPYYHYTERLEGDRQRLEELLFTLEDPQQIYGYLEAPEKRPLFSMARLDRIKNLTGLAEAFGRSKALQERCNLILVAGKLRTADSSDREEIAEIEKLYQIIHQYNLHGKIRWLGIRLPKADSGEIYRIIADRQGIFVQPALFEAFGLTILEAMISGLPTFGTRFGGPLEIIQDGVNGFYINPTHLEEMAETIVRFLEACDRDPQEWQRISKAGIERVYSTYTWKIHCTRLLSLAKIYGFWNFSSQENREDMMRYMEALFHLLYKPRAQALLAEHLQR

SEQ ID NO: 1324 - protein, 808 aa, Artificial Sequence
  engineered sucrose synthase encoded in plasmid pA35935
MTSVLLKAVVESDERADLRQFSRILQLGEKRYLLRNDILDAFHDYCRNQGRPVPPPSESRLSKLIFYTQEIIVDNESLCWIIRPRIAQQEVYRLLVEDLTIVPMTIPELLDLRDRLVNHYHPNEGDVFEIDVQPFYDYSPIIRDAKNIGKGVEFLNRYLSSKLFQDPRQWQQNLFNFLQIHRYNGYQLLINERIRSPQHLSEQVKQALVTLSDRASAEAYSEFRFELQNLGFEPGWGNTVARVRDTLEILDQLMDSPDHQVLEAFVSRIPMLFRIALISPHGWFGQEGVLGRPDTGGQVVYILDQVKSLEKQMQEDLELAGLGVLEAQPKIIVLTRLIPNCEGTLCNQRLEKIYGTNNAWILRVPFREFNPKVTQNWISRFEIWPYLETFAIDAERELRAEFGHVPDLIIGNYSDGNLVAFLLARRLKVTQCNIAHALEKSKYLFSNLYWQDLEDKYHFSLQFTADLIAMNAANFIISSTYQEIVGTPDSIGQYESYQSFTMPELYHVVNGIELFSPKFNVVPPGVNEQVYFPYYHYTERLEGDRQRLEELLFTLEDPQQIYGYLEAPEKRPLFSMARLDRIKNLTGLAEAFGRSKALQERCNLILVAGKLRTADSSDREEIAEIEKLYQIIHQYNLHGKIRWLGIRLPKADSGEIYRIIADRQGIFVQPALFEAFGLTILEAMISGLPTFGTRFGGPLEIIQDGVNGFYINPTHLEEMAETIVRFLEACDRDPQEWQRISKAGIERVYSTYTWKIHCTRLLSLAKIYGFWNFSSQENREDMMRYMEALFHLLYKPRAQALLAEHLQR

SEQ ID NO: 1325 - protein, 808 aa, Artificial Sequence
  engineered sucrose synthase encoded in plasmid pA35936
MTSVLLKSVVESEERADLRQFSRILQLGEKRYLLRNDILGAFADYCRNQGRPVPPPSSSRLSKLVFYTQEIIVDNESLCWIIRPRIAQQEVCRLLVEDLTIVPMTIPELLDLRDRLVNRYHPNEGDVFEIDVQPFYDYSPIIRDAKNIGKGVEFLNRYLSSKLFQDPRQWQQTLFNFLQIHRYNGYQLLINERIRSPQQLSEQVKQALVVLSDRAPDEAYSEFRFELQNLGFEPGWGNTVARVRDTLEILDQLLDSPDHQVLEAFVSRIPMLFRIALISPHGWFGQEGVLGRPDTGGQVVYILDQVKSLEKQLQEDLELAGLGVLEAQPKIIVLTRLIPNAEGTLCNQRLEKIYGTNDAWILRVPFREFNPKVTQNWISRFEIWPYLETFAIDAETELRAEFGHVPDLIIGNYSDGNLVAFLLARRMKVTQCNIAHALEKSKYLFSNLYWQDLEDKYHFSLQFTADLIAMNAANFIISSTYQEIVGTPDSIGQYESYQSFTMPDLYHVVNGIELFSPKFNVVPPGVNEQVYFPYYHYTERLEGDRQRLEELLFTLEDPQQIYGYLEAPEKRPLFSMARLDRIKNLTGLAEAFGRSKALQERCNLILVAGKLRTADSSDREEIAEIEKLYQIIHQYNLHGKIRWLGIRLPKADSGEIYRIIADRQGIFVQPALFEAFGLTILEAMISGLPTFGTRFGGPLEIIQDGVNGFYINPTHLEEMAETIVRFLEACDRDPQEWQRISKAGIERVYSTYTWKIHCTRLLSLAKIYGFWNFSSQENREDMMRYMEALFHLLYKPRAQALLAEHLQR

SEQ ID NO: 1326 - protein, 808 aa, Artificial Sequence
  engineered sucrose synthase encoded in plasmid pA35937
MTSVLLKAVVESDERADLRQFSRILQTGEKRYFLRNDILDAFADYCRNQERPVPPPDSSRLSKLVFYTQEIIFDNESLCWIIRPRIAQQEVCRLLVEDMTIVPMTIPELLDLRDRLVNHYHPNEGDVFEIDVQPFYDYSPIIRDAKNIGKGVEFLNRYLSSKLFQDPRQWQQNLFNFLQIHRYNGYQLLINERIRSPQHLSEQVKQALVTLSDRASDEAYEEFRFELQNLGFEPGWGNTVARVRDTLEILDQLLDSPDHQVLEAFVSRIPMLFRIALISPHGWFGQEGVLGRPDTGGQVVYILDQVKSLEKQMQEDLELAGLGVLEAQPKIIVLTRLIPNSEGTLCNQRLEKIYGTNNAWILRVPFREFNPKVTQNWISRFEIWPYLETFAIDAERELRAEFGHVPDLIIGNYSDGNLVAFLLARRMKVTQCNIAHALEKSKYLFSNLYWQDLEDKYHFSLQFTADLIAMNAANFIISSTYQEIVGTPDSIGQYESYQSFTMPDLYHVVNGIELFSPKFNVVPPGVNEQVYFPYYHYTERLEGDRQRLEELLFTLEDPQQIYGYLEAPEKRPLFSMARLDRIKNLTGLAEAFGRSKALQERCNLILVAGKLRTADSSDREEIAEIEKLYQIIHQYNLHGKIRWLGIRLPKADSGEIYRIIADRQGIFVQPALFEAFGLTILEAMISGLPTFGTRFGGPLEIIQDGVNGFYINPTHLEEMAETIVRFLEACDRDPQEWQRISKAGIERVYSTYTWKIHCTRLLSLAKIYGFWNFSSQENREDMMRYMEALFHLLYKPRAQALLAEHLQR

SEQ ID NO: 1327 - protein, 808 aa, Artificial Sequence
  engineered sucrose synthase encoded in plasmid pA35938
MTSVLLKSVVESDERADLRQFSRILQLGEKRYLLRNDILGAFADYCRALGRPVPTPSESRLSKLVFYTQEIIVDNESLCWIIRPRIAQQEVCRLLVEDLTIVPMTIPELLDLRDRLVNRYHPNEGDVFEIDVQPFYDYSPIIRDAKNIGKGVEFLNRYLSSKLFQDPRQWQQNLFNFLQIHRYNGYQLLINERIRSPQQLSEQVKQALVTLSDRASDEAYSEFRFELQNLGFEPGWGNTAARVRDTLEILDQLLDSPDHQVLEAFVSRIPMLFRIALISPHGWFGQEGVLGRPDTGGQVVYILDQVKSLEKQMREDLELAGLGVLEARPKIIVLTRLIPNSEGTLCNQRLEKIYGTNNAWILRVPFREFNPKVTQNWISRFEIWPYLETFAIDAERELRAEFGHVPDLIIGNYSDGNLVAFLLARRMKVTQCNIAHALEKSKYLFSNLYWQDLEDKYHFSMQFTADLIAMNAANFIISSTYQEIVGTPDSIGQYESYQSFTMPDLYHVVNGIELFSPKFNVVPPGVNEQVYFPYYHYTERLEGDRQRLEELLFTLEDPQQIYGYLEAPEKRPLFSMARLDRIKNLTGLAEAFGRSKALQERCNLILVAGKLRTADSSDREEIAEIEKLYQIIHQYNLHGKIRWLGIRLPKADSGEIYRIIADRQGIFVQPALFEAFGLTILEAMISGLPTFGTRFGGPLEIIQDGVNGFYINPTHLEEMAETIVRFLEACDRDPQEWQRISKAGIERVYSTYTWKIHCTRLLSLAKIYGFWNFSSQENREDMMRYMEALFHLLYKPRAQALLAEHLQR

SEQ ID NO: 1328 - protein, 808 aa, Artificial Sequence
  engineered sucrose synthase encoded in plasmid pA35939
MTSVLLKAVVESDERADLRQFSRILQTGEKRYFLRNDILDAFADYCRNQGRPVPPPSSSRLSKLIFYTQEIIVDNESLCWIIRPRIAQQEVCRLLVEDLTIVPMTIPELLDLRDRLVNHYHPNEGDVFEIDVQPFYDYSPIIRDAKNIGKGVEFLNRYLSSKLFQDPRQWQQNLFNFLQIHRYNGYQLLINERIRSPQHLSEQVKQALVTLSDRAPAEPYEEFRFELQNLGFEPGWGNTVARVRDTLEILDQLMDSPDHQVLEAFVSRIPMLFRIALISPHGWFGQEGVLGRPDTGGQVVYILDQAKSLEKQLQEDLELAGLGVLEARPKIIVLTRLIPNAEGTLCNQRLEKIYGTNNAWILRVPFREFNPKVTQNWISRFEIWPYLETFAIDAETELRAEFGHVPDLIIGNYSDGNLVAFLLARRLKVTQCNIAHALEKSKYLFSNLYWQDLEDKYHFSLQFTADLIAMNAANFIISSTYQEIVGTPDSIGQYESYQSFTMPELYHVVNGIELFSPKFNVVPPGVNEQVYFPYYHYTERLEGDRQRLEELLFTLEDPQQIYGYLEAPEKRPLFSMARLDRIKNLTGLAEAFGRSKALQERCNLILVAGKLRTADSSDREEIAEIEKLYQIIHQYNLHGKIRWLGIRLPKADSGEIYRIIADRQGIFVQPALFEAFGLTILEAMISGLPTFGTRFGGPLEIIQDGVNGFYINPTHLEEMAETIVRFLEACDRDPQEWQRISKAGIERVYSTYTWKIHCTRLLSLAKIYGFWNFSSQENREDMMRYMEALFHLLYKPRAQALLAEHLQR

SEQ ID NO: 1329 - protein, 808 aa, Artificial Sequence
  engineered sucrose synthase encoded in plasmid pA35940
MTSVLLKSVVDSEERADLRQFSRILQLGEKGYLLRNDILDAFADYCRNQGRPVPPPSESRLSKLVFYTQEIIVDNESLCWIIRPRIAQQEVCRLLVEDLTIVPMTIPELLDLRDRLVNHYHPNDGDLFEIDVQPFYDYSPIIRDAKNIGKGVEFLNRYLSSKLFQDPRQWQQTLFNFLQIHRYNGYQLLINERIRSPQQLSEQVKQALVTLSDRAPAAAYQEFRFELQNLGFEPGWGNTVARVRDTLEILDQLLDSPDHQVLEAFVSRIPMLFRIALVSPHGWFGQEGVLGRPDTGGQVVYILDQVKSLEKQMQEDLELAGLGVLEARPKIIVLTRLIPNCEGTLCNQRLEKIYGTNNAWILRVPFREFNPKVTQNWISRFEIWPYLETFAIDAERELRAEFGHVPDLIIGNYSDGNLVAFLLARRLKVTQCNIAHALEKSKYLFSNLYWQDLEDKYHFSLQFTADLIAMNAANFIISSTYQEIVGTPDSIGQYESYQSFTMPDLYHVVNGIELFSPKFNVVPPGVNEQVYFPYYHYTERLEGDRQRLEELLFTLEDPQQIYGYLEAPEKRPLFSMARLDRIKNLTGLAEAFGRSKALQERCNLILVAGKLRTADSSDREEIAEIEKLYQIIHQYNLHGKIRWLGIRLPKADSGEIYRIIADRQGIFVQPALFEAFGLTILEAMISGLPTFGTRFGGPLEIIQDGVNGFYINPTHLEEMAETIVRFLEACDRDPQEWQRISKAGIERVYSTYTWKIHCTRLLSLAKIYGFWNFSSQENREDMMRYMEALFHLLYKPRAQALLAEHLQR

SEQ ID NO: 1330 - protein, 808 aa, Artificial Sequence
  engineered sucrose synthase encoded in plasmid pA35941
MTSVLLKSVVESDERADLRQFSRILQTGEKRYLLRNDILNAFADYCRNQGRPVPPPSESRLSKLVFYTQEIIVDDESLCWIIRPRIAQQEVYRLLVEDLTIVPMTIPELLDLRDRLVNRYHPNEGDVFEIDVQPFYDYSPIIRDAKNIGKGVEFLNRYLSSKLFQDPRQWQQALFNFLQIHRYNGYQLLINERIRSPQHLSEQVKQALVFLSDRAPDEAYSEFRFELQNLGFEPGWGNTAARVRDTLEILDQLIDSPDHQVLEAFVSRIPMLFRIALISPHGWFGQEGVLGRPDTGGQVVYILDQVKSLEKQLQEDLELAGLGVLEAQPKIIVLTRLIPNSEGTLCNQRLEKVYGTNNAWILRVPFREFNPKVTQNWISRFEIWPYLETFAIDAERELRAEFGHHPDLIIGNYSDGNLVAFLLARRMKVTQCNIAHALEKSKYLFSNLYWQDLEDKYHFSLQFTADLIAMNAANFIISSTYQEIVGTPDSIGQYESYQSFTMPDLYHVVNGIELFSPKFNVVPPGVNEQVYFPYYHYTERLEGDRQRLEELLFTLEDPQQIYGYLEAPEKRPLFSMARLDRIKNLTGLAEAFGRSKALQERCNLILVAGKLRTADSSDREEIAEIEKLYQIIHQYNLHGKIRWLGIRLPKADSGEIYRIIADRQGIFVQPALFEAFGLTILEAMISGLPTFGTRFGGPLEIIQDGVNGFYINPTHLEEMAETIVRFLEACDRDPQEWQRISKAGIERVYSTYTWKIHCTRLLSLAKIYGFWNFSSQENREDMMRYMEALFHLLYKPRAQALLAEHLQR

SEQ ID NO: 1331 - protein, 808 aa, Artificial Sequence
  engineered sucrose synthase encoded in plasmid pA35942
MTSVLLKSVIESDERADLRQFSRILQLGEKRYLLRNDILNAFAEYCRNQGRPVPPPSESRLSKLVFYTQEIIFDNESLCWIIRPQIAQQEVYRLLVEDLTVVPMTIPELLDLRDRLVNHYHPNEGDVFEIDVQPFYDYSPIIRDAKNIGKGVEFLNRYLSSKLFQDPRQWQQALFNFLQIHRYNGYQLLINERIRSPQQLSEQVKQALVTLSDRAPDEPYSEFRFELQNLGFEPGWGNTVARVRDTLEILDQLLDSPDHQVLEAFVSRIPMLFRIALISPHGWFGQEGVLGRPDTGGQVVYILDQVKSLEKQMQEDLELAGLGVLEARPKIIVLTRLIPNAEGTLCNQRLEKIYGTNNAWILRVPFREFNPKVTQNWITRFEIWPYLETFAIDAERELRAEFGHVPDLIIGNYSDGNLVAFLLARRMKVTQCNIAHALEKSKYLFSNLYWQDLEDKYHFSLQFTADLIAMNAANFIISSTYQEIVGTPDSIGQYESYQSFTMPDLYHVVNGIELFSPKFNVVPPGVNEQVYFPYYHYTERLEGDRQRLEELLFTLEDPQQIYGYLEAPEKRPLFSMARLDRIKNLTGLAEAFGRSKALQERCNLILVAGKLRTADSSDREEIAEIEKLYQIIHQYNLHGKIRWLGIRLPKADSGEIYRIIADRQGIFVQPALFEAFGLTILEAMISGLPTFGTRFGGPLEIIQDGVNGFYINPTHLEEMAETIVRFLEACDRDPQEWQRISKAGIERVYSTYTWKIHCTRLLSLAKIYGFWNFSSQENREDMMRYMEALFHLLYKPRAQALLAEHLQR

SEQ ID NO: 1332 - protein, 808 aa, Artificial Sequence
  engineered beta-1,2-glycosyltransferase encoded in plasmid pA35943
MTSVLLKSVIESDERTDLRQFSRILQTGEKGYLLRNDILDAFHDYCRNQGRPVPPPLSSRLSKLVFYTQEIIVDNESLCWIIRPRIAQQEVCRLLVEDLTIVPMTIPELLDLRDRLVNHYHPNEGDVFEIDVQPFYDYSPIIRDAKNIGKGVEFLNRYLSSKLFQDPRQWQQNLFNFLQIHRYNGYQLLINERIRSPQHLSEQVKQALVTLSDRASAEAYEEFRFELQNLGFEPGWGNTVARVRDTLEILDQLMDSPDHQVLEAFVSRIPMLFRIALISPHGWFGQEGVLGRPDTGGQVVYILDQVKSLEKQMQEDLELAGLGVLEAQPKIIVLTRLIPNAEGTLCNQRLEKIYGTNNAWILRVPFREFNPKVTQNWISRFEIWPYLETFAIDAEKELRAEFGHVPDLIIGNYSDGNLVAFLLARRMKVTQCNIAHALEKSKYLFSNLYWQDLEDKYHFSLQFTADLIAMNAANFIISSTYQEIVGTPDSIGQYESYQSFTMPDLYHVVNGIELFSPKFNVVPPGVNEQVYFPYYHYTERLEGDRQRLEELLFTLEDPQQIYGYLEAPEKRPLFSMARLDRIKNLTGLAEAFGRSKALQERCNLILVAGKLRTADSSDREEIAEIEKLYQIIHQYNLHGKIRWLGIRLPKADSGEIYRIIADRQGIFVQPALFEAFGLTILEAMISGLPTFGTRFGGPLEIIQDGVNGFYINPTHLEEMAETIVRFLEACDRDPQEWQRISKAGIERVYSTYTWKIHCTRLLSLAKIYGFWNFSSQENREDMMRYMEALFHLLYKPRAQALLAEHLQR

SEQ ID NO: 1333 - protein, 440 aa, Artificial Sequence
  engineered beta-1,2-glycosyltransferase encoded in plasmid pA35481
PSLRVLMFPWLALGHVNPFLRIAKQLAKRGFVVYLVSTAINLESISKRLPEKYSNSIHLVELQLPQLPELPPHYHTTNGLPPHLNGILFKALKMAAPNFSKILQTLNPDLVLYDFLQPWAEEVAREQGIPAVPLLTSGAALFVYFFHFLKKPGTEFPFPAIALSKWMQDKMREMFGKEPTDKDFFAPGNAGIMLICTSRVIEAKYLDYCSELTNVKVIPVGPPFQDPTTEDIDDPELKKWLDKKPPNSVVYVSFGSEYFLSKEDMEEIALGLELSNVNFIWVIRFPKEERTNLEDVLPPGFLERVKDRGMVLDHLVPQAHILNHPSVGGFISHCGWNSVMESLYFGVPIIAMPMQWDQPINARLLVELGVAIEIRRDENGRIHRDEVARVLKEVMTGPTGEKLRRIVREISERLRRKRDEEMDKYAEELIQLCRNRNAYK

SEQ ID NO: 1334 - protein, 440 aa, Artificial Sequence
  engineered beta-1,2-glycosyltransferase encoded in plasmid pA35482
QSLRVLMFPWLALGHVNPFLRIAKQLAKRGFVVYLVSTAINLESISKRLPEKYSNSIHLVELQLPQLPELPPHYHTTNGLPPHLNGILFKALKMAAPNFSKILQTLNPDLVLYDFLQPWAEEVAREQGIPAVPLLTSGAALFVYFFHFLKKPGTEFPFPAIALSKWMQDKMREMFGKEPTDKDFFAPGNAGIMLICTSRVIEAKYLDYCSELTNVKVIPVGPPFQDPTTEDIDDPELKKWLDKKPPNSVVYVSFGSEYFLSKEDMEEIALGLELSNVNFIWVIRFPKEERTNLEDVLPKGFLERVKDRGMVLDHLVPQAHILNHPSVGGFISHCGWNSVMESLYFGVPIIAMPMQWDQPINARLLVELGVAIEIRRDENGRIHRDEVARVLKEVMTGPTGEKLRRIVREISERLRRKRDEEMDKYAEELIQLCRNRNAYK

SEQ ID NO: 1335 - protein, 440 aa, Artificial Sequence
  engineered beta-1,2-glycosyltransferase encoded in plasmid pA35483
QSLRVLMFPWLALGHVNPFLRIAKQLADRGFVVYLVSTAINLESIKKRLPEKYSNSIHLVELQLPQLPELPPHYHTTNGLPPHLNGILFKALKMAAPEFSKILQTLNPDLVLYDFLQPWAEKVARELGIPAVPLLTSGAALFVYFFHFLKKPGHEFPFPAIKLSKWMQDKMREMFGKEPTDKDFFAPGNAGIMLICTSRVIEAKYLDYCSELTNVKVVPVGPPFQDPTTEDIDDPELKKWLDKKPPNSVVYVSFGSEYFLSKEDMEEIAKALELSNVPFIWVIRFPKDKRQKLEDVLPPGFLERVKDRGMVLGHLVPQAHILNHPSTGGFISHCGWNSVMESLVFGVPIIAMPMQWDQPINARLLQELGVAVEIRRDENGRIHRDEIARVLKEVMTGPTGEKLRRIVREISERLRRKRDEEMDKYAEELIQLCRNRNAYK

SEQ ID NO: 1336 - protein, 440 aa, Artificial Sequence
  engineered beta-1,2-glycosyltransferase encoded in plasmid pA35484
QSLRVLMFPWLALGHVNPFLRIAKQLADRGFVVYLVSTAINLESIKKRLPEKYSNSIHLVELQLPQLPELPPHYHTTNGLPPHLNGILFKALKMAAPEFSKILQTLNPDLVLYDFLQPWAEKVARELGIPAVPLLTSGAALFVYFFHFLKKPGHEFPFPAIKLSKWMQDKMREMFGKEPTDKDFFAPGNAGIMLICTSRVIEAKYLDYCSELTNVKVVPVGPPFQDPTTEDIDDPELKKWLDKKPPNSVVYVSFGSEYFLSKEDMEEIAKALELSNVPFIWVIRFPKDKRQKLEDVLPKGFLERVKDRGMVLDHLVPQAHILNHPSTGGFISHCGWNSVMESLVFGVPIIAMPMQWDQPINARLLQELGVAVEIRRDENGRIHRDEIARVLKEVMTGPTGEKLRRIVREISERLRRKRDEEMDKYAEELIQLCRNRNAYK

SEQ ID NO: 1337 - protein, 440 aa, Artificial Sequence
  engineered beta-1,2-glycosyltransferase encoded in plasmid pA35485
QSLRVLMFPWLALGHVNPFLRIAKQLAKRGFVVYLVSTAINLESIKKRLPEKYSNSIHLVELQLPQLPELPPHYHTTNGLPPHLNGILFKALKMAAPNFSKILQTLKPDLVLYDFLQPWAEKVARELGIPAVPLLTSGAALFVYFFHFLKKPGVEFPFPAIYLYKWRQDKMREMFGKEPTDKDFFAPGNAGIMLINTSRVIEAKYLDYCSELTNVKVVPVGPPFQDPTTEDIDDPELKKWLDKKPPNSVVYVSFGSEYFLSKEDMEEIAKALELSNVPFIWVVRPPKDERQNLEDVLPPGFLERVKDRGMVLDHLVPQAHILNHPSTGGFISHCGWNSVMESLYFGVPIIAMPMQWDQPINARLLVELGVAVEIRRDEDGRIHRDEIARVLKEVMTGPTGEKLRRKVREISERLRRKRDEEMDKFAEELIQLCRNRNAYK

SEQ ID NO: 1338 - protein, 440 aa, Artificial Sequence
  engineered beta-1,2-glycosyltransferase encoded in plasmid pA35486
QSLRVLMFPWLALGHVNPFLRIAKQLAKRGFVVYLVSTAINLESIKKRLPEKYSNSIHLVELQLPQLPELPPHYHTTNGLPPHLNGILFKALKMAAPNFSKILQTLKPDLVLYDFLQPWAEKVARELGIPAVPLLTSGAALFSYFFHFLKKPGVEFPFPAIYLYKWRQDKMREMFGKEPTDKDFFAPGNAGIMLICTSRVIEAKYLDYCSELTNVKVVPVGPPFQDPTTEDIDDPELKKWLDKKPPNSVVYVSFGSEYFLSKEDMEEIAKALELSNVPFIWVVRFPKDERQNLEDVLPPGFLERVKDRGMVLDHLVPQAHILNHPSTGGFISHCGWNSVMESLYFGVPIIAMPMQWDQPINARLLVELGVAVEIRRDEDGRIHRDEIARVLKEVMTGPTGEKLRRKVREISERLRRKRDEEMDKFAEELIQLCRNRNAYK

SEQ ID NO: 1339 - protein, 440 aa, Artificial Sequence
  engineered beta-1,2-glycosyltransferase encoded in plasmid pA35487
PSLRVLMFPWLALGHVNPFLRIAKQLAKRGFVVYLVSTAINLESIKKRLPEKYSNSIHLVELQLPQLPELPPHYHTTNGLPPHLNGILFKALKMAAPNFSKILQTLKPDLVLYDFLQPWAEKVAREQGIPAVPLLTSGAALFVYFFHFLKKPGTEFPFPAIKLSKWEQDKMREMFGKEPTDKDFFAPGNAGIMLICTSRVIEAKYLDYCSELTNVKVIPVGPPFQDPTTEDIDDPELKKWLDKKPPNSVVYVSFGSEYFLSKEDMEEIALALELSNVNFIWVVRFPKDERQNLEDVLPPGFLERVKDRGMVLDHLVPQAHILNHPSVGGFISHCGWNSVMESLYFGVPIIAMPMQWDQPINARLLVELGVAVEIRRDEDGRIHRDEIARVLKEVMTGPTGEKLRRKVREISERLRRKREEEMDKFAEELIQLCRNRNAYK

SEQ ID NO: 1340 - protein, 440 aa, Artificial Sequence
  engineered beta-1,2-glycosyltransferase encoded in plasmid pA35488
QSLRVLMFPWLALGHVNPFLRIAKQLAKRGFVVYLVSTAINLESIKKRLPEKYSNSIHLVELQLPQLPELPPHYHTTNGLPPHLNGILFKALKMAAPNFSKILQTLKPDLVLYDFLQPWAEKVAREQGIPAVPLLTSGAALFSYFFHFLKKPGTEFPFPAIKLSKWEQDKMREMFGKEPTDKDFFAPGNAGIMLICTSRVIEAKYLDYCSELTNVKVIPVGPPFQDPTTEDIDDPELKKWLDKKPPNSVVYVSFGSEYFLSKEDMEEIALALELSNVNFIWVVRFPKDERQNLEDVLPPGFLERVKDRGMVLDHLVPQAHILNHPSVGGFISHCGWNSVMESLYFGVPIIAMPMQWDQPINARLLVELGVAVEIRRDEDGRIHRDEIARVLKEVMTGPTGEKLRRKVREISERLRRKREEEMDKFAEELIQLCRNRNAYK

SEQ ID NO: 1341 - protein, 440 aa, Artificial Sequence
  engineered beta-1,2-glycosyltransferase encoded in plasmid pA35489
QSLRVLMFPWLALGHVNPFLRIAKQLAKRGFVVYLVSTAINLESIKKRLPEKYSNSIHLVELQLPQLPELPPHYHTTNGLPPHLNGILFKALKMAAPNFSKILQTLKPDLVLYDFLQPWAEKVAREQGIPAVPLLTSGAALFVYFFHFLKKPGHEFPFPAIKLSKWEQDKMREMFGKEPTDKDFFAPGNAGIMLICTSRVIEAKYLDYCSELTNVKVIPVGPPFQDPTTEDIDDPELIKWLDKKPPNSVVYVSFGSEYFLSKEDMEEIALALELSNVPFIWVARFPKDERQNLEDVLPPGFLERVGDRGMVLDHLVPQAHILNHPSTGGFISHCGWNSVMESLYFGVPIIAMPMQWDQPINARLLVELGVAVEIRRDEDGRIHRDEIARVLKEVMTGPTGEKLRRKVREISERLRRKREEEMDKFAEELIQLCRNRNAYK

SEQ ID NO: 1342 - protein, 440 aa, Artificial Sequence
  engineered beta-1,2-glycosyltransferase encoded in plasmid pA35490
QSLRVLMFPWLALGHVNPFLRIAKQLAKRGFVVYLVSTAINLESIKKRLPEKYSNSIHLVELQLPQLPELPPHYHTTNGLPPHLNGILFKALKMAAPNFSKILQTLKPDLVLYDFLQPWAEKVAREQGIPAVPLLTSGAALFSYFFHFLKKPGHEFPFPAIKLSKWEQDKMREMFGKEPTDKDFFAPGNAGIMLICTSRVIEAKYLDYCSELTNVKVIPVGPPFQDPTTEDIDDPELIKWLDKKPPNSVVYVSFGSEYFLSKEDMEEIALALELSNVPFIWVARFPKDERQNLEDVLPKGFLERVGDRGMVLDHLVPQAHILNHPSTGGFISHCGWNSVMESLYFGVPIIAMPMQWDQPINARLLVELGVAVEIRRDEDGRIHRDEIARVLKEVMTGPTGEKLRRKVREISERLRRKREEEMDKFAEELIQLCRNRNAYK

SEQ ID NO: 1343 - protein, 440 aa, Artificial Sequence
  engineered beta-1,2-glycosyltransferase encoded in plasmid pA35491
QSLRVLMFPWLALGHVNPFLRIAKQLAKRGFVVYLVSTAINLESIKKRLPEKYSNSIHLVELQLPQLPELPPHYHTTNGLPPHLNGILFKALKMAAPNFSKILQTLKPDLVLYDFLQPWAEKVAREHGIPAVPLLTSGAALFVYFFHFLKKPGVEFPFPAIKLSKWEQDKMREMFGKEPTDKDFFAPGNAGIMLICTSRVIEAKYLDYCSELTNVKVVPVGPPFQDPTTEDIDDPELKKWLDKKPPNSVVYVSFGSEYFLSKEDMEEIALALELSNVNFIWVVRPPKAERQNLEDVLPPGFLERVKDRGMVLDHLVPQAHILNHPSTGGFISHCGWNSVMESLDFGVPIIAMPMQWDQPINARLLVELGVAVEIRRDEDGRIHRDEIARVLKEVMTGPTGEKLRRKVREISERLRRKREEEMDKFAEELIQLCRNRNAYK

SEQ ID NO: 1344 - protein, 440 aa, Artificial Sequence
  engineered beta-1,2-glycosyltransferase encoded in plasmid pA35492
QSLRVLMFPWLALGHVNPFLRIAKQLAKRGFVVYLVSTAINLESIKKRLPEKYSNSIHLVELQLPQLPELPPHYHTTNGLPPHLNGILFKALKMAAPNFSKILQTLKPDLVLYDFLQPWAEKVAREHGIPAVPLLTSGAALFSYFFHFLKKPGVEFPFPAIKLSKWEQDKMREMFGKEPTDKDFFAPGNAGIMLICTSRVIEAKYLDYCSELTNVKVVPVGPPFQDPTTEDIDDPELKKWLDKKPPNSVVYVSFGSEYFLSKEDMEEIALALELSNVNFIWVVRFPKAERQNLEDVLPKGFLERVKDRGMVLDHLVPQAHILNHPSTGGFISHCGWNSVMESLDFGVPIIAMPMQWDQPINARLLVELGVAVEIRRDEDGRIHRDEIARVLKEVMTGPTGEKLRRKVREISERLRRKREEEMDKFAEELIQLCRNRNAYK

SEQ ID NO: 1345 - protein, 440 aa, Artificial Sequence
  engineered beta-1,2-glycosyltransferase encoded in plasmid pA35493
QSLRVLMFPWLALGHVNPFLRIAKQLAKRGFVVYLVSTAINLESIKKRLPEKYSNSIHLVELQLPQLPELPPHYHTTNGLPPHLNGILFKALKMAAPNFSKILQTLKPDLVLYDFLQPWAEKVAREQGIPAVPLLTSGAALFVYFFHFLKKPGHEFPFPAIKLSKWEQDKMREMFGKEPTDKDFFAPGNAGIMLICTSRVIEAKYLDYCSELTNVKVVPVGPPFQDPTTEDIDDPELIKWLDKKPPNSVVYVSFGSEYFLSKEDMEEIAFALELSNVPFIWVARFPKGERQNLEDVLPPGFLERVGDRGMVLDHLVPQAHILNHPSTGGFISHCGWNSVMESLYFGVPIIAMPMQWDQPINARLLVELGVAVEIRRDEDGRIHRDEIARVLKDVMTGPTGEKLRRKVREISERLRRKREEEMDKVAEELIQLCRNRNAYK

SEQ ID NO: 1346 - protein, 440 aa, Artificial Sequence
  engineered beta-1,2-glycosyltransferase encoded in plasmid pA35494
QSLRVLMFPWLALGHVNPFLRIAKQLADRGFVVYLVSTAINLESIKKRLPEKYSNSIHLVELQLPQLPELPPHYHTTNGLPPHLNGILFKALKMAAPNFSKILQTLKPDLVLYDFLQPWAEKVARELGIPAVPLLTSGAALFVYFFHFLKKPGHEFPFPAIKLSKWEQDKMREMFGKEPTDKDFFAPGNAGIMLICTSRVIEAKYLDYCSELTNVKVVPVGPPFQDPTTEDIDDPELIKWLDKKPPNSVVYVSFGSEYFLSKEDMEEIAFALELSNVNFIWVARFPKDERQNLEDVLPPGFLERVRDRGRVLDHLVPQAHILNHPSTGGFISHCGWNSVMESLYFGVPIIAMPMQWDQPINARLLVELGVAVEIRRDEDGRIHRDEIARVLKDVMTGPTGEKLRRKVREISERLRRKREEEMDKFAEELIQLCRNRNAYK

SEQ ID NO: 1347 - protein, 440 aa, Artificial Sequence
  engineered beta-1,2-glycosyltransferase encoded in plasmid pA35495
QSMRVLMFPWLALGHVNPFLRIAKQLAKRGFVVYLVSTAINLESIKKRIPEKYSNSIHLVELQLPQLPELPPHYHTTNGLPPHLNGILWKALMMAAPNFSKILQTLKPDLVLYDFLQPWAEKVAREHGIPAVPLLTSGAALFAYFFHFLKKPGVEFPFPAIKWSKWEQDKMREMFGKEPTDKDFFAPGNAGIMLICTSRVIEAKYLDYCSELTNVKVVPVGPPFQDPTTEDIDDPELIKWLDWKPPNSVVYVSFGSEYFLSKEDMEEIALGLELSNVPFIWVARFPKGERQNLEDVLPPGFLERVGDRGMVLDHLVPQAHILNHPSTGGFISHCGWNSVMESLYFGVPIIAMPMQWDQPINARLLEELGVAVEIRRDENGRIHRDEIARVLKEVMTGEEGEKLRRNVREISERLRRKREEEMDKAAEELWQLCRNRNAYK

SEQ ID NO: 1348 - protein, 440 aa, Artificial Sequence
  engineered beta-1,2-glycosyltransferase encoded in plasmid pA35496
QSMRVLMFPWLALGHVNPFLRIAKQLAKRGFVVYLVSTAINLESIKKRIPEKYSNSIHLVELQLPQLPELPPHYHTTNGLPPHLNGILWKALMMAAPNFSKILQTLKPDLVLYDFLQPWAEKVAREHGIPAVPLLTSGAALFAYFFHFLKKPGVEFPFPAIKWSKWEQDKMREMFGKEPTDKDFFAPGNAGIMLICTSRVIEAKYLDYCSELTNVKVVPVGPPFQDPTTEDIDDPELIKWLDWKPPNSVVYVSFGSEYFLSKEDMEEIALGLELSNVPFIWVARFPKGERQNLEDVLPKGFLERVGDRGMVLDHLVPQAHILNHPSTGGFISHCGWNSVMESLYFGVPIIAMPMQWDQPINARLLEELGVAVEIRRDENGRIHRDEIARVLKEVMTGEEGEKLRRNVREISERLRRKREEEMDKAAEELWQLCRNRNAYK

SEQ ID NO: 1349 - protein, 440 aa, Artificial Sequence
  engineered beta-1,2-glycosyltransferase encoded in plasmid pA35497
QSLRVLMFPWLALGHVNPFLRIAKQLAKRGFVVYLVSTAINLESIKKRIPEKYSNSIHLVELQLPQLPELPPHYHTTNGLPPHLNGILFKALKMAAPNFSKILQTLKPDLVLYDFLQPWAEKVAREHGIPAVPLLTSGAALFAYFFHFLKKPGHEFPFPAIKLSKWEQDKMREMFGKEPTDKDFFAPGNAGIMLINTSRVIEAKYLDYCSELTNVKVVPVGPPFQDPTTEDIDDPELTKWLDWKPPNSVVYVSFGSEYFLSKEDMEEIALGLELSNVNFIWVARFPKGERQNLEDVLPPGFLERVGDRGMVLDHLVPQAHILNHPSTGGFISHCGWNSVMESLYFGVPIIAMPMQWDQPINARLLEELGVAVEIRRDENGRIHRDEIARVLKEVMTGEEGEKLRRNVREISERLRRKRDEEMDKFAEELWQLCRNRNAYK

SEQ ID NO: 1350 - protein, 440 aa, Artificial Sequence
  engineered beta-1,2-glycosyltransferase encoded in plasmid pA35498
QSLRVLMFPWLALGHVNPFLRIAKQLAKRGFVVYLVSTAINLESIKKRIPEKYSNSIHLVELQLPQLPELPPHYHTTNGLPPHLNGILFKALKMAAPNFSKILQTLKPDLVLYDFLQPWAEKVAREHGIPAVPLLTSGAALFAYFFHFLKKPGHEFPFPAIKLSKWEQDKMREMFGKEPTDKDFFAPGNAGIMLICTSRVIEAKYLDYCSELTNVKVVPVGPPFQDPTTEDIDDPELTKWLDWKPPNSVVYVSFGSEYFLSKEDMEEIALGLELSNVNFIWVARFPKGERQNLEDVLPKGFLERVGDRGMVLDHLVPQAHILNHPSTGGFISHCGWNSVMESLYFGVPIIAMPMQWDQPINARLLEELGVAVEIRRDENGRIHRDEIARVLKEVMTGEEGEKLRRNVREISERLRRKRDEEMDKFAEELWQLCRNRNAYK

SEQ ID NO: 1351 - protein, 440 aa, Artificial Sequence
  engineered beta-1,2-glycosyltransferase encoded in plasmid pA35499
QSLRVLMFPWLALGHVNPFLRIAKQLAKRGFVVYLVSTAINLESIKKRIPEKYSNSIHLVELQLPQLPELPPHYHTTNGLPPHLNGILWKALKMAAPNFSKILQTLKPDLVLYDFLQPWAEKVAREHGIPAVPLLTSGAALFAYFFHFLKKPGVEFPFPAIKWSKWEQDKMREMFGKEPTDKDFFAPGNAGIMLICTSRVIEAKYLDYCSELTNVKVVPVGPPFQDPTTEDIDDPELTKWLDKKPPNSVVYVSFGSEYFLSKEDMEEIAFGLELSNVNFIWVARFPKGERQNLEDVLPKGFLERVGDRGRVLDHLVPQAHILNHPSTGGFISHCGWNSVMESLYFGVPIIAMPMQWDQPINARLLEELGVAVEIRRDEDGRIHRDEIARVLKEVMTGETGEKLRRNVREISERLRRKREEEMDKVAEELWQLCRNRNAYK

SEQ ID NO: 1352 - protein, 440 aa, Artificial Sequence
  engineered beta-1,2-glycosyltransferase encoded in plasmid pA35500
ETLRVVMFPWLALGHVNPFLRIAKQLADRGFIIYMVSTAINLQSISKRLPEKYSNSIHLVELHLPELPELPPHYHTTNGLPPHLNGILHKALQMAAPNFSKILQNLKPDLVLYDFLQPWAAKVALEQGIPAVPLLTSGAALFCYFFHFLKKPGVEFPFPEIYLSERMQDWMREMFGTSPTEKDFLAPGNAGIMLMNTSREIEAKYLDYCTTLGHVKVIPVGPPFQDPNTEDNDDMELIKWLDKKPPNSVVYVSFGSEYFLSREDMEEIAHGLELSNVNFIWVSRPPKGETQNLEDVLPPGFLERVKDRGMVLDHLVPQAHILNHPSTGGFISHCGWNSVMESLVFGVPIIAMPMQWDQPINARLLVELGVAVEIRRDEDGRIHREEIAQVIKDVITGPTAEELRRKVWDISERLRRRAEEEMDKAAEELIQLCRNRNAYK

SEQ ID NO: 1353 - protein, 440 aa, Artificial Sequence
  engineered beta-1,2-glycosyltransferase encoded in plasmid pA35501
ETLRVVMFPWLALGHVNPFLRIAKQLADRGFIIYMVSTAINLQSISKRLPEKYSNSIHLVELHLPELPELPPHYHTTNGLPPHLNGILHKALQMAAPNFSKILQNLKPDLVLYDFLQPWAAKVALEQGIPAVPLLTSGAALFCYFFHFLKKPGVEFPFPEIYLSERMQDWMREMFGTSPTEKDFLAPGNAGIMLMCTSREIEAKYLDYCTTLGHVKVIPVGPPFQDPNTEDNDDPELIKWLDKKPPNSVVYVSFGSEYFLSREDMEEIAHGLELSNVNFIWVSRFPKGETQNLEDVLPKGFLERVKDRGMVLDHLVPQAHILNHPSTGGFISHCGWNSVMESLVFGVPIIAMPMQWDQPINARLLVELGVAVEIRRDEDGRIHREEIAQVIKDVITGPTAEELRRKVWDISERLRRRAEEEMDKAAEELIQLCRNRNAYK

SEQ ID NO: 1354 - protein, 440 aa, Artificial Sequence
  engineered beta-1,2-glycosyltransferase encoded in plasmid pA35502
ETLRVVMFPWLALGHVNPFLRIAKQLADRGFIIYMVSTAINLQSISKRLPEKYSNSIHLVELHLPELPELPPHYHTTNGLPPHLNGILHKALQMAAPNFSKILQNLKPDLVLYDFLQPWAAKVALEQGIPAVPLLTSGAALFCYFFHFLKKPGVEFPFPEIYLSERMQDWMREMFGTSPTEKDFLAPGNAGIMLMCTSREIEAKYLDYCTTLGHVKVIPVGPPFQDPNTEDNDDPELIKWLDKKPPNSVVYVSFGSEYFLSREDMEEIAHGLELSNVNFIWVSRFPKGETQNLEDVLPPGFLERVKDRGMVLDHLVPQAHILNHPSTGGFISHCGWNSVMESLVFGVPIIAMPMQWDQPINARLLVELGVAVEIRRDEDGRIHREEIAQVIKDVITGPTAEELRRKVWDISERLRRRAEEEMDKAAEELIQLCRNRNAYK

SEQ ID NO: 1355 - protein, 440 aa, Artificial Sequence
  engineered beta-1,2-glycosyltransferase encoded in plasmid pA35503
ETLRVVMFPWLALGHVNPFLRIAKQLADRGFIIYMVSTAINLQSISKRLPEKYSNSIHLVELHLPELPELPPHYHTTNGLPPHLNGILHKALQMAAPNFSKILQNLKPDLVLYDFLQPWAAKVALEQGIPAVPLLTSGAALFCYFFHFLKKPGVEFPFPEIYLSERMQDWMREMFGTSPTEKDFLAPGNAGIMLMNTSREIEAKYLDYCTTLGHVKVIPVGPPFQDPNTEDNDDPELIKWLDKKPPNSVVYVSFGSEYFLSREDMEEIAHGLELSNVNFIWVSRFPKGETQNLEDVLPKGFLERVKDRGMVLDHLVPQAHILNHPSTGGFISHCGWNSVMESLVFGVPIIAMPMQWDQPINARLLVELGVAVEIRRDEDGRIHREEIAQVIKDVITGPTAEELRRKVWDISERLRRRAEEEMDKAAEELIQLCRNRNAYK

SEQ ID NO: 1356 - protein, 440 aa, Artificial Sequence
  engineered beta-1,2-glycosyltransferase encoded in plasmid pA35504
ETLRVVMFPWLALGHVNPFLRIAKQLADRGFIIYMVSTAINLQSISKRLPEKYSNSIHLVELHLPELPELPPHYHTTNGLPPHLNGILHKALQMAAPNFSKILQNLKPDLVLYDFLQPWAAKVALEQGIPAVPLLTSGAALFCYFFHFLKKPGVEFPFPEIYLSERMQDWMREMFGTSPTEKDFLAPGNAGIMLMNTSREIEAKYLDYCTTLGHVKVIPVGPPFQDPNTEDNDDMELIKWLDKKPPNSVVYVSFGSEYFLSREDMEEIAHGLELSNVNFIWVSRPPKGETQNLEDVLPKGFLERVKDRGMVLDHLVPQAHILNHPSTGGFISHCGWNSVMESLVFGVPIIAMPMQWDQPINARLLVELGVAVEIRRDEDGRIHREEIAQVIKDVITGPTAEELRRKVWDISERLRRRAEEEMDKAAEELIQLCRNRNAYK

SEQ ID NO: 1357 - protein, 440 aa, Artificial Sequence
  engineered beta-1,2-glycosyltransferase encoded in plasmid pA35505
ETLRVVMFPWLALGHVNPFLRIAKQLADRGFIIYMVSTAINLESIKKRLPEKYSNSIHLVELHLPELPELPPHYHTTNGLPPHLNGILHKALQMSAPNFSKILQNLKPDLVLYDFLQPWAAKVALEQGIPAVPLLTSGAALFAYFFHFLKRPGHEFPFPEIYLSERMQDWMREMFGTNPTEKDFLAPGNAGIMLMNTSREIEAKYLDYCTTLGNVKVVPVGPPFQDPNTEDNDDMELIKWLDKKPPNSVVYVSFGSEYFLSREDMEEIAHGLELSNVNFIWVARPPKGETQNLEDVLPPGFLERVKDRGMVLDHLVPQAHILNHPSTGGFISHCGWNSVMESLVFGVPIIAMPMQWDQPINARLLVELGVAVEIRRDEDGRIHREEIAQVLKDVITGPTAEELRRKVWDISERLRRRREEEMDKAAEELIQLCRNRNAYK

SEQ ID NO: 1358 - protein, 440 aa, Artificial Sequence
  engineered beta-1,2-glycosyltransferase encoded in plasmid pA35506
ETLRVVMFPWLALGHVNPFLRIAKQLADRGFIIYMVSTAINLESIKKRLPEKYSNSIHLVELHLPELPELPPHYHTTNGLPPHLNGILHKALQMSAPNFSKILQNLKPDLVLYDFLQPWAAKVALEQGIPAVPLLTSGAALFAYFFHFLKRPGHEFPFPEIYLSERMQDWMREMFGTNPTEKDFLAPGNAGIMLMCTSREIEAKYLDYCTTLGNVKVVPVGPPFQDPNTEDNDDPELIKWLDKKPPNSVVYVSFGSEYFLSREDMEEIAHGLELSNVNFIWVARFPKGETQNLEDVLPKGFLERVKDRGMVLDHLVPQAHILNHPSTGGFISHCGWNSVMESLVFGVPIIAMPMQWDQPINARLLVELGVAVEIRRDEDGRIHREEIAQVLKDVITGPTAEELRRKVWDISERLRRRREEEMDKAAEELIQLCRNRNAYK

SEQ ID NO: 1359 - protein, 440 aa, Artificial Sequence
  engineered beta-1,2-glycosyltransferase encoded in plasmid pA35507
ETLRVVMFPWLALGHVNPFLRIAKQLADRGFIIYMVSTAINLESIKKRLPEKYSNSIHLVELHLPELPELPPHYHTTNGLPPHLNGILHKALQMSAPNFSKILQNLKPDLVLYDFLQPWAAKVALEQGIPAVPLLTSGAALFAYFFHFLKRPGHEFPFPEIYLSERMQDWMREMFGTNPTEKDFLAPGNAGIMLMCTSREIEAKYLDYCTTLGNVKVVPVGPPFQDPNTEDNDDPELIKWLDKKPPNSVVYVSFGSEYFLSREDMEEIAHGLELSNVNFIWVARFPKGETQNLEDVLPPGFLERVKDRGMVLDHLVPQAHILNHPSTGGFISHCGWNSVMESLVFGVPIIAMPMQWDQPINARLLVELGVAVEIRRDEDGRIHREEIAQVLKDVITGPTAEELRRKVWDISERLRRRREEEMDKAAEELIQLCRNRNAYK

SEQ ID NO: 1360 - protein, 440 aa, Artificial Sequence
  engineered beta-1,2-glycosyltransferase encoded in plasmid pA35508
ETLRVVMFPWLALGHVNPFLRIAKQLADRGFIIYMVSTAINLESIKKRLPEKYSNSIHLVELHLPELPELPPHYHTTNGLPPHLNGILHKALQMSAPNFSKILQNLKPDLVLYDFLQPWAAKVALEQGIPAVPLLTSGAALFAYFFHFLKRPGHEFPFPEIYLSERMQDWMREMFGTNPTEKDFLAPGNAGIMLMNTSREIEAKYLDYCTTLGNVKVVPVGPPFQDPNTEDNDDMELIKWLDKKPPNSVVYVSFGSEYFLSREDMEEIAHGLELSNVNFIWVARFPKGETQNLEDVLPPGFLERVKDRGMVLDHLVPQAHILNHPSTGGFISHCGWNSVMESLVFGVPIIAMPMQWDQPINARLLVELGVAVEIRRDEDGRIHREEIAQVLKDVITGPTAEELRRKVWDISERLRRRREEEMDKAAEELIQLCRNRNAYK

SEQ ID NO: 1361 - protein, 440 aa, Artificial Sequence
  engineered beta-1,2-glycosyltransferase encoded in plasmid pA35509
QTLRVVMFPWLALGHVNPFLRIAKQLADRGFIIYMVSTAINLESIKKRIPEKYSNSIHLVELHLPELPELPPHYHTTNGLPPHLNGILHKALQMSAPNFSKILQNLKPDLVLYDFLQPWAAKVALEQGIPAVPLLTSGAALFSYFFHFLKRPGHEFPFPEIYLSEREQDWMREMFGTNPTEKDFLAPGNAGIMLMNTSREIEAKYLDYCTTLTNVKVVPVGPPFQDPNTEDNDDMELIKWLDKKPPNSVVYVSFGSEYFLSREDMEELAHGLELSNVNFIWVARPPKGETQNLEDVLPKGFLERVKDRGMVLDHLVPQAHILNHPSTGGFISHCGWNSVMESLVFGVPIIAMPMQWDQPINARLLVELGVAVEIRRDEDGRIHREEIAQVLKDVITGPTGEELRRKVRDISERLRRRREEEMDKAAEELIQLCRNRNAYK

SEQ ID NO: 1362 - protein, 440 aa, Artificial Sequence
  engineered beta-1,2-glycosyltransferase encoded in plasmid pA35510
QTLRVVMFPWLALGHVNPFLRIAKQLADRGFIIYMVSTAINLESIKKRIPEKYSNSIHLVELHLPELPELPPHYHTTNGLPPHLNGILHKALQMSAPNFSKILQNLKPDLVLYDFLQPWAAKVALEQGIPAVPLLTSGAALFSYFFHFLKRPGHEFPFPEIYLSEREQDWMREMFGTNPTEKDFLAPGNAGIMLMCTSREIEAKYLDYCTTLTNVKVVPVGPPFQDPNTEDNDDPELIKWLDKKPPNSVVYVSFGSEYFLSREDMEELAHGLELSNVNFIWVARFPKGETQNLEDVLPKGFLERVKDRGMVLDHLVPQAHILNHPSTGGFISHCGWNSVMESLVFGVPIIAMPMQWDQPINARLLVELGVAVEIRRDEDGRIHREEIAQVLKDVITGPTGEELRRKVRDISERLRRRREEEMDKAAEELIQLCRNRNAYK

SEQ ID NO: 1363 - protein, 440 aa, Artificial Sequence
  engineered beta-1,2-glycosyltransferase encoded in plasmid pA35511
QTLRVVMFPWLALGHVNPFLRIAKQLADRGFIIYMVSTAINLESIKKRIPEKYSNSIHLVELHLPELPELPPHYHTTNGLPPHLNGILHKALQMSAPNFSKILQNLKPDLVLYDFLQPWAAKVALEQGIPAVPLLTSGAALFSYFFHFLKRPGHEFPFPEIYLSEREQDWMREMFGTNPTEKDFLAPGNAGIMLMNTSREIEAKYLDYCTTLTNVKVVPVGPPFQDPNTEDNDDPELIKWLDKKPPNSVVYVSFGSEYFLSREDMEELAHGLELSNVNFIWVARFPKGETQNLEDVLPKGFLERVKDRGMVLDHLVPQAHILNHPSTGGFISHCGWNSVMESLVFGVPIIAMPMQWDQPINARLLVELGVAVEIRRDEDGRIHREEIAQVLKDVITGPTGEELRRKVRDISERLRRRREEEMDKAAEELIQLCRNRNAYK

SEQ ID NO: 1364 - protein, 440 aa, Artificial Sequence
  engineered beta-1,2-glycosyltransferase encoded in plasmid pA35512
QTLRVVMFPWLALGHVNPFLRIAKQLADRGFIIYMVSTAINLESIKKRIPEKYSNSIHLVELHLPELPELPPHYHTTNGLPPHLNGILHKALQMSAPNFSKILQNLKPDLVLYDFLQPWAAKVALEQGIPAVPLLTSGAALFSYFFHFLKRPGHEFPFPEIYLSEREQDWMREMFGTNPTEKDFLAPGNAGIMLMCTSREIEAKYLDYCTTLTNVKVVPVGPPFQDPNTEDNDDMELIKWLDKKPPNSVVYVSFGSEYFLSREDMEELAHGLELSNVNFIWVARFPKGETQNLEDVLPKGFLERVKDRGMVLDHLVPQAHILNHPSTGGFISHCGWNSVMESLVFGVPIIAMPMQWDQPINARLLVELGVAVEIRRDEDGRIHREEIAQVLKDVITGPTGEELRRKVRDISERLRRRREEEMDKAAEELIQLCRNRNAYK

SEQ ID NO: 1365 - protein, 440 aa, Artificial Sequence
  engineered beta-1,2-glycosyltransferase encoded in plasmid pA35513
QTLRVVMFPWLALGHVNPFLRIAKQLADRGFIIYMVSTAINLESIKKRIPEKYSNSIHLVELHLPELPELPPHYHTTNGLPPHLNGILHKALQMSAPNFSKILQNLKPDLVLYDFLQPWAAKVALEQGIPAVPLLTSGAALFSYFFHFLKRPGHEFPFPEIYLSEREQDWMREMFGTNPTEKDFLAPGNAGIMLMNTSREIEAKYLDYCTTLTNVKVVPVGPPFQDPNTEDNDDMELIKWLDKKPPNSVVYVSFGSEYFLSREDMEEIAHGLELSNVNFIWVARMPKGETQNLEDVLPKGFLERVGDRGMVLDHLVPQAHILNHPSTGGFISHCGWNSVMESLDFGVPIIAMPMQWDQPINARLLVELGVAVEIRRDEDGRIHREEIAQVLKDVITGPTGEELRRKVRDISERLRRRREEEMDKAAEELIQLCRNRNAYK

SEQ ID NO: 1366 - protein, 440 aa, Artificial Sequence
  engineered beta-1,2-glycosyltransferase encoded in plasmid pA35514
QTLRVVMFPWLALGHVNPFLRIAKQLADRGFIIYMVSTAINLESIKKRIPEKYSNSIHLVELHLPNLPELPPHYHTTNGLPPHLNGILHKALQMSAPNFSKILQNLKPDLVLYDFLQPWAAKVALEQGIPCVPLLTSGAALFAYFFHFLKRPGHEFPFPEIRLREREQDMMREMFGTGPTEKDFLAPGNAGIMLMCTSREIEAKYLDYCTTLTNVKVVPVGPPFQDPNTNDNDDPELIKWLDKKPPNSVVYVSFGSEYFLSREDMEEIAHGLELSNVNFIWVARFPKGEEQNLEEVLPPGFLERVGDRGMVLDHLVPQAHILNHPSTGGFISHCGWNSVMESLHFGVPIIAMPMQWDQPINARLLVELGVAVEIRRDEDGRIHREEIAQVLRDVITGPTGEELRRNVWEISERLRRRGEEEMDKAAEELIQLCRNRNAYK

SEQ ID NO: 1367 - protein, 440 aa, Artificial Sequence
  engineered beta-1,2-glycosyltransferase encoded in plasmid pA35515
QTLRVVMFPWLALGHVNPFLRIAKQLADRGFIIYMVSTAINLESIKKRIPEKYSNSIHLVELHLPNLPELPPHYHTTNGLPPHLNGILHKALQMSAPNFSKILQNLKPDLVLYDFLQPWAAKVALEQGIPAVPLLTSGAALFAYFFHFLKRPGHEFPFPEIRLREREQDMMREMFGTGPTEKDFLAPGNAGIMLMCTSREIEAKYLDYCTTLTNVKVVPVGPPFQDPNTNDNDDPELIKWLDKKPPNSVVYVSFGSEYFLSREDMEEIAHGLELSNVNFIWVARFPKGEEQNLEEVLPKGFLERVGDRGMVLDHLVPQAHILNHPSTGGFISHCGWNSVMESLHFGVPIIAMPMQWDQPINARLLVELGVAVEIRRDEDGRIHREEIAQVLRDVITGPTGEELRRNVWEISERLRRRGEEEMDKAAEELIQLCRNRNAYK

SEQ ID NO: 1368 - protein, 440 aa, Artificial Sequence
  engineered beta-1,2-glycosyltransferase encoded in plasmid pA35516
QTLRVVMFPWLALGHVNPFLRIAKQLADRGFIIYMVSTAINLESIKKRIPEKYSNSIHLVELHLPNLPELPPHYHTTNGLPPHLNGILHKALQMSAPNFSKILQNLKPDLVLYDFLQPWAAKVALEQGIPCVPLLTSGAALFCYFFHFLKRPGHEFPFPEIRLREREQDMMREMFGTGPTEKDFLAPGNAGIMLMCTSREIEAKYLDYCTTLTNVKVVPVGPPFQDPNTNDNDDPELIKWLDKKPPNSVVYVSFGSEYFLSREDMEEIAHGLELSNVNFIWVARFPKGEEQNLEEVLPKGFLERVGDRGMVLDHLVPQAHILNHPSTGGFISHCGWNSVMESLHFGVPIIAMPMQWDQPINARLLVELGVAVEIRRDEDGRIHREEIAQVLRDVITGPTGEELRRNVWEISERLRRRGEEEMDKAAEELIQLCRNRNAYK

SEQ ID NO: 1369 - protein, 440 aa, Artificial Sequence
  engineered beta-1,2-glycosyltransferase encoded in plasmid pA35517
QTQQVLMFPWLALGHVNPFLRIAKQLADRGFVIYLVSTAINLELAKKRLPYKYSNSIHLVEYNLPELPELPPHLHTTNGLPPHLNGTLHKALDMSAPEFSKQVQNKKPDLVLYDFLIPWAEKVALSQGVPGVPLLTSGAALFSYFFHFAKLPKNEFPFPEIRLKKREQDHMREMFGTGPTELDFKVIANASIMLMNTSREIEAKYLDYCQKLTNVPVVPVGAPFQDPLTEDDYDPRLIRWLDTQPPNSVVYVSFGSEYFLSKEQMQEIAFGLELSGVNFIWVARFPKGEEQNLEDVLPKGFLERVGDRGMVLSHLVPQAKILEHKSTAGFISHCGWNSVLESIMFGVPIIAMPMQWDQPINARLLVELGVAVEVRRDEDGRIHRDDIAKVLRDVISGPTGEILRANVRDIALRLRARRDEEMEEAAEELRQLCRNRRALK

SEQ ID NO: 1370 - protein, 440 aa, Artificial Sequence
  engineered beta-1,2-glycosyltransferase encoded in plasmid pA35518
QTQQVLMFPWLALGHVNPFLRIAKQLADRGFVIYLVSTAINLELAKKRLPYKYSNSIHLVEYNLPELPELPPHLHTTNGLPPHLNGTLHKALDMSAPEFSKQVQNKKPDLVLYDFLIPWAEKVALSQGVPGVPLLTSGAALFSYFFHFAKLPKNEFPFPEIRLKKREQDHMREMFGTGPTELDFKVIANASIMLMCTSREIEAKYLDYCQKLTNVPVVPVGAPFQDPLTEDDYDPRLIRWLDTQPPNSVVYVSFGSEYFLSKEQMQEIAFGLELSGVNFIWVARFPKGEEQNLEDVLPKGFLERVGDRGMVLSHLVPQAKILEHKSTAGFISHCGWNSVLESIMFGVPIIAMPMQWDQPINARLLVELGVAVEVRRDEDGRIHRDDIAKVLRDVISGPTGEILRANVRDIALRLRARRDEEMEEAAEELRQLCRNRRALK

SEQ ID NO: 1371 - protein, 440 aa, Artificial Sequence
  engineered beta-1,2-glycosyltransferase encoded in plasmid pA35519
QTQQVLMFPWLALGHVNPFLRIAKQLADRGFVIYLVSTAINLELAKKRLPYKYSNSIHLVEYNLPELPELPPHLHTTNGLPPHLNGTLHKALKMSAPEFSKQVQNKKPDLVLYDFLIPWAEKVALSQGVPGVPLLTSGAALFSYFFHFAKLPKHEFPFPAIRLHKREQDHMREMFGTGPTELDFKVIANASIMLMNTSREIEAKYLDYCQKLTNVPVVPVGAPFQDPLTEDIYDPRLIRWLDTQPPNSVVYVSFGSEYFLSREQMQEIAFGLELSGVNFIWVARFPKGEEQNLEDVLPKGFLERVGDRGRVLSHLVPQAKILAHKSTAGFISHCGWNSVLESIMFGVPIIAMPMQWDQPINARLLVELGVAVEVRRDEDGRIHRDDIAKVLKDVISGPTGEILRANVRDIALRLRARREEEMEEAAEELLQLCRNRRALK

SEQ ID NO: 1372 - protein, 440 aa, Artificial Sequence
  engineered beta-1,2-glycosyltransferase encoded in plasmid pA35520
QTQQVLMFPWLALGHVNPFLRIAKQLADRGFVIYLVSTAINLELAKKRLPYKYSNSIHLVEYNLPELPELPPHLHTTNGLPPHLNGTLHKALKMSAPEFSKQVQNKKPDLVLYDFLIPWAEKVALSQGVPGVPLLTSGAALFSYFFHFAKLPKHEFPFPAIRLHKREQDHMREMFGTGPTELDFKVIANASIMLMCTSREIEAKYLDYCQKLTNVPVVPVGAPFQDPLTEDIYDPRLIRWLDTQPPNSVVYVSFGSEYFLSREQMQEIAFGLELSGVNFIWVARFPKGEEQNLEDVLPKGFLERVGDRGRVLSHLVPQAKILAHKSTAGFISHCGWNSVLESIMFGVPIIAMPMQWDQPINARLLVELGVAVEVRRDEDGRIHRDDIAKVLKDVISGPTGEILRANVRDIALRLRARREEEMEEAAEELLQLCRNRRALK

SEQ ID NO: 1373 - protein, 440 aa, Artificial Sequence
  engineered beta-1,2-glycosyltransferase encoded in plasmid pA35521
QTQQVLMFPWLALGHVNPFLRIAKQLADRGFVIYLVSTAINLELAKKRLPYKYSNSIHLVEYQLPELPELPPHLHTTNGLPPHLNGTLHKALKMLAPEFSKQVQNKKPDLVLYDFLIPWAEKVALSQGVPGVPLLTSGAALFSYFFHFLKLPKHEFPFPEIRLHKREQDYMREMFGTGPTELDFKVVANASIMLMCTSRVIEAKYLDYCQKLTNVPVVPVGAPFQDPLTEDDYNPELIRWLDTQPPNSVVYVSFGSEYFLSREQMQEIAFGLELSGVNFIWVARFPKGEEQNLEDVLPKGFLERVGDRGMVLDHLVPQAKILAHKSTAGFISHCGWNSVMESIDFGVPIIAMPMQWDQPINARLLVELGVAVEVRRDEDGRIHRDDIAKVLKDVISGPTAEILRANVRDIALRLRARREEEMEEAAEELLQLCRNRRALK

SEQ ID NO: 1374 - protein, 440 aa, Artificial Sequence
  engineered beta-1,2-glycosyltransferase encoded in plasmid pA35522
QTQQVLMFPWLALGHVNPFLRIAKQLADRGFVIYLVSTAINLELAKKRLPYKYSNSIHLVEYQLPELPELPPHLHTTNGLPPHLNGTLHKALKMSAPEFSKQVQNLKPDLVLYDFLIPWAEKVALSQGVPGVPLLTSGAALFSYFFHFLKEPGHEFPFPAIRLHKREQDKMREMFGTEPTELDFLVVANASIMLMCTSRVIEAKYLDYCQKLTNVPVVPVGAPFQDPLTEDIYDPRLIRWLDTKPPNSVVYVSFGSEYFLSREQMQEVAFGLELSGVNFIWVARFPKGEEQNLEDVLPKGFLERVGDRGRVLSHLVPQAKILAHKSIAGFISHCGWNSVMESIDFGVPIIAMPMQWDQPINARLLVELGVAVEVRRDEDGRIHRDEIAKVLKDVISGPTGEILRANVRDIALRLRARREEEMNEAAEELLQLCRNRRALK

SEQ ID NO: 1375 - protein, 440 aa, Artificial Sequence
  engineered beta-1,2-glycosyltransferase encoded in plasmid pA35523
QTQQVLMFPWLALGHVNPFLRIAKQLADRGFVIYLVSTAINLELAKKRLPYKYSNSIHLVEYQLPELPELPPHLHTTNGLPPHLNGTLHKALKMSAPEFSKQVQNLKADLVLYDFLIPWAEKVALSQGVPGVPLLTSGAALFSYFFHFLKESGHEFPFPAIRLHKREQDKMREMFGTEPTELDFLVVANASIMLMNTSRVIEAKYLDYCQKLTNVPVVPVGAPFQDPLTEDIYDPRLIRWLDTKPPNSVVYVSFGSEYFLSREQMQEVAFGLELSGVNFIWVARFPKGEEQNLEDVLPKGFLERVGDRGRVLSHLVPQAKILAHKSIAGFISHCGWNSVMESIDFGVPIIAMPMQWDQPINARLLVELGVAVEVRRDEDGRIHRDEIAKVLKDVISGPTGEILRANVRDIALRLRARREEEMNEAAEELLQLCRNRRALK

SEQ ID NO: 1376 - protein, 440 aa, Artificial Sequence
  engineered beta-1,2-glycosyltransferase encoded in plasmid pA35524
QTQQVLMFPWLALGHVNPFLRIAKQLADRGFVIYLVSTAINLELAKKRLPYKYSNSIHLVEYALPELPELPPHLHTTNGLPPHLNGTLHKALKMSAPEFSKQVQNLKADLVLYDFLIPWAEKVALSQGVPGVPLLTSGAALFSYFFHFLKLPGHEFPFPAIRLKKREQDHMREMFGTEPTELDFLVVANAGIMLMNTSRVIEAKYLDYCQKLTNVPVVPVGAPFQDPLTEDIYDPRLIRWLDTKPPNSVVYVSFGSEYFLSREQMQEVAFGLELSGVNFIWVARFPKGEEQNLEDVLPKGFLERVGDRGRVLDHLVPQAHILAHKSTAGFISHCGWNSVMESIDFGVPIIAMPMQWDQPINARLLVELGVAVEVRRDEDGRIHRDEIAKVLKDVISGPTGEILRANVRDIALRLRARREEEMNAAAEELLQLCRNRRALK

SEQ ID NO: 1377 - protein, 440 aa, Artificial Sequence
  engineered beta-1,2-glycosyltransferase encoded in plasmid pA35525
QTQQVLMFPWLALGHVNPFLRIAKQLADRGFVIYLVSTAINLELAKKRLPYKYSNSIHLVEYALPELPELPPHLHTTNGLPPHLNGTLHKALKMSAPEFSKQVQNLKPDLVLYDFLIPWAEKVALSQGVPGVPLLTSGAALFSYFFHFLKLPGHEFPFPAIRLKKREQDHMREMFGTEPTELDFLVVANAGIMLMCTSRVIEAKYLDYCQKLTNVPVVPVGAPFQDPLTEDIYDPRLIRWLDTKPPNSVVYVSFGSEYFLSREQMQEVAFGLELSGVNFIWVARFPKGEEQNLEDVLPKGFLERVGDRGRVLDHLVPQAHILAHKSTAGFISHCGWNSVMESIDFGVPIIAMPMQWDQPINARLLVELGVAVEVRRDEDGRIHRDEIAKVLKDVISGPTGEILRANVRDIALRLRARREEEMNAAAEELLQLCRNRRALK

SEQ ID NO: 1378 - protein, 440 aa, Artificial Sequence
  engineered beta-1,2-glycosyltransferase encoded in plasmid pA35526
QTQQVLMFPWLALGHVNPFLRIAKQLADRGFVIYLVSTAINLELAKKRLPYKYSNSIHLVEYALPELPELPPHLHTTNGLPPHLNGTLHKALKMSAPEFSKQVQNLKPDLVLYDFLIPWAEKVALSQGVPGVPLLTSGAALFSYFFHFLKLPGHEFPFPAIRLHKREQDKMREMFGTEPTELDFLVMANAGIMLMCTSRVIEAKYLDYCQKLTNVPVVPVGAPFQDPLTEDIYNPELIRWLDTKPPNSVVYVSFGSEYFLSREQMQEVAFGLELSGVNFIWVARFPKGEEQNLEDVLPKGFLERVGDRGRVLDHLVPQAHILAHKSTAGFISHCGWNSVMESIDFGVPIIAMPMQWDQPINARLLVELGVAVEVRRDEDGRIHRDEIAKVLKDVISGPTGEILRANVRDIALRLRARREEEMNAAAEELLQLCRNRRALK

SEQ ID NO: 1379 - protein, 440 aa, Artificial Sequence
  engineered beta-1,2-glycosyltransferase encoded in plasmid pA35527
QTQQVLMFPWLALGHVNPFLRIAKQLADRGFVIYLVSTAINLELAKKRIPYKYSNSIHLVEYNLPSLPELPPHLHTTNGLPPHLNGTLHKAHDMSAPEFSKQVQNLKPDLVLYDFLIPWAEKVARSQGVPGVPLLTSGAALFSYFFHFYKKPGNEFPFPAIRLGKREQDHMREQFGTGPTELDFQVPANASIMLMCTSREIEAKYLDYCQKLTNVPVVPVGAPFQDPLTEDVYDPRLLRWLDKQPPNSVVYVSFGSEYFLSKEQMQEVAKGLELSGVNFIWVARFPKGEEQNLEDVLPKGFLERTGGRGMVLDHLVPQAKILAHKSTGGFISHCGWNSVMESIDFGVPIIAMPMQWDQPINARLLEELGVAVEVRRDEDGRFHRDEIAKVLRDVISGPTGEILRANVRDIALRLRKRREEEMNAAAEELLQLCRNRRALK

SEQ ID NO: 1380 - protein, 440 aa, Artificial Sequence
  engineered beta-1,2-glycosyltransferase encoded in plasmid pA35528
QTQQVLMFPWLALGHVNPFLRIAKQLADRGFVIYLVSTAINLELAKKRIPYKYSNSIHLVEYNLPSLPELPPHLHTTNGLPPHLNGTLHKAHDMSAPEFSKQVQNLKPDLVLYDFLIPWAEKVARSQGVPGVPLLTSGAALFSYFFHFYKKPGNEFPFPAIRLGKREQDHMREQFGTGPTELDFQVPANASIMLMCTSREIEAKYLDYCQKLTNVPVVPVGAPFQDPLTEDVYDPRLLRWLDKQPPNSVVYVSFGSEYFLSKEQMQEVAKGLELSGVNFIWVARFPKGEEQNLEDVLPKGFLERTGGRGMVLSHLVPQAKILAHKSTGGFISHCGWNSVMESIDFGVPIIAMPMQWDQPINARLLEELGVAVEVRRDEDGRFHRDEIAKVLRDVISGPTGEILRANVRDIALRLRKRREEEMNAAAEELLQLCRNRRALK

SEQ ID NO: 1381 - protein, 440 aa, Artificial Sequence
  engineered beta-1,2-glycosyltransferase encoded in plasmid pA35529
QTQQVLMFPWLALGHVNPFLRIAKQLADRGFVIYLVSTAINLELAKKRIPYKYSNSIHLVEYNLPSLPELPPHLHTTNGLPPHLNGTLHKAHDMSAPEFSKQVQNLKPDLVLYDFLIPWAEKVARSQGVPGVPLLTSGAALFSYFFHFYKKPGNEFPFPAIRLGKREQDHMREQFGTGPTELDFQVPANASIMLMCTSRCIEAKYLDYCQKLTNVPVVPVGAPFQDPLTEDVYDPRLLRWLDKQPPNSVVYVSFGSEYFLSKEQMQEVAKGLELSGVNFIWVARFPKGEEQNLEDVLPKGFLERTGGRGMVLDHLVPQAKILAHKSTGGFISHCGWNSVMESIDFGVPIIAMPMQWDQPINARLLEELGVAVEVRRDEDGRFHRDEIAKVLRDVISGPTGEILRANVRDIALRLRKRREEEMNCAAEELLQLCRNRRALK

SEQ ID NO: 1382 - protein, 440 aa, Artificial Sequence
  engineered beta-1,2-glycosyltransferase encoded in plasmid pA35530
QTQQVLMFPWLALGHVNPFLRIAKQLADRGFVIYLVSTAINLELAKKRIPYKYSNSIHLVEYNLPELPELPPHLHTTNGLPPHLNGTLHKAFKMSAPEFSKQVQNLKPDLVLYDFLIPWAEKVARSQGVPGVPLLTSGAALFSYFFHFYKRPGNEFPFPAIRLGKREQDHMREMFGTEPTELDFLVPANAGIMLMNTSREIEAKYLDYCQKLTNVKVVPVGAPFQDPLTEDIYDPRLLRWLDTKPPNSVVYVSFGSEYFLSKEQMQEVAFGLELSGVNFIWVARFPKGEEQNLEDVLPKGFLERVGGRGMVLSHLVPQAKILAHKSTGGFISHCGWNSVMESIDFGVPIIAMPMQWDQPINARLLVELGVAVEIRRDEDGRIHRDEIAQVLRDVISGPTGEILRANVRDIALRLRARREEEMNDAAEELLQLCRNRRALK

SEQ ID NO: 1383 - protein, 440 aa, Artificial Sequence
  engineered beta-1,2-glycosyltransferase encoded in plasmid pA35531
QTQQVLMFPWLALGHVNPFLRIAKQLADRGFVIYLVSTAINLELAKKRIPYKYSNSIHLVEYNLPELPELPPHLHTTNGLPPHLNGTLHKAFKMSAPEFSKQVQNLKPDLVLYDFLIPWAEKVARSQGVPGVPLLTSGAALFSYFFHFYKRPGNEFPFPAIRLGKREQDHMREMFGTEPTELDFLVPANAGIMLMCTSREIEAKYLDYCQKLTNVKVVPVGAPFQDPLTEDIYDPRLLRWLDTKPPNSVVYVSFGSEYFLSKEQMQEVAFGLELSGVNFIWVARFPKGEEQNLEDVLPKGFLERVGGRGMVLSHLVPQAKILAHKSTGGFISHCGWNSVMESIDFGVPIIAMPMQWDQPINARLLVELGVAVEIRRDEDGRIHRDEIAQVLRDVISGPTGEILRANVRDIALRLRARREEEMNDAAEELLQLCRNRRALK

SEQ ID NO: 1384 - protein, 440 aa, Artificial Sequence
  engineered beta-1,2-glycosyltransferase encoded in plasmid pA35532
QTQQVLMFPWLALGHVNPFLRIAKQLADRGFVIYLVSTAINLELAKKRIPYKYSNSIHLVEYNLPELPELPPHLHTTNGLPPHLNGTLHKAFKMSAPEFSKQVQNLKPDLVLYDFLIPWAEKVARSQGVPGVPLLTSGAALFSYFFHFYKRPGNEFPFPAIRLGKREQDHMREMFGTEPTELDFLVPANAGIMLMCTSREIEAKYLDYCQKLTNVKVVPVGAPFQDPLTEDIYDPELLRWLDTKPPNSVVYVSFGSEYFLSKEQMQEVAFGLELSGVNFIWVARFPKGEEQNLEDVLPKGFLERVGGRGMVLDHLVPQAKILAHKSTGGFISHCGWNSVMESIDFGVPIIAMPMQWDQPINARLLVELGVAVEIRRDEDGRIHRDEIAQVLRDVISGPTGEILRANVRDIALRLRARREEEMNDAAEELLQLCRNRRALK

SEQ ID NO: 1385 - protein, 440 aa, Artificial Sequence
  engineered beta-1,2-glycosyltransferase encoded in plasmid pA35533
QTQQVLMFPWLALGHVNPFLRIAKQLADRGFVIYLVSTAINLELAKKRIPYKYSNSIHLVEYNLPELPELPPHLHTTNGLPPHLNGTLHKAFKMSAPEFSKQVQNLKPDLVLYDFLIPWAEKVARSQGVPGVPLLTSGAALFSYFFHFYKRPGHEFPFPAIRLGKREQDHMREMFGTEPTELDFLVPANAGIMLMNTSREIEAKYLDYCQKLTNVKVVPVGAPFQDPLTEDIYDPRLLRWLDTKPPNSVVYVSFGSEYFLSREQMQEVAFGLELSGVNFIWVARFPKGEEQNLEDVLPKGFLERVGDRGMVLSHLVPQAKILAHKSTGGFISHCGWNSVMESIDFGVPIIAMPMQWDQPINARLLVELGVAVEIRRDEDGRIHRDEIAQVLRDVISGPTGEILRANVRDIALRLRARREEEMNAAAEELLQLCRNRRALK

SEQ ID NO: 1386 - protein, 440 aa, Artificial Sequence
  engineered beta-1,2-glycosyltransferase encoded in plasmid pA35534
QTQQVLMFPWLALGHVNPFLRIAKQLADRGFVIYLVSTAINLELAKKRIPYKYSNSIHLVEYNLPELPELPPHLHTTNGLPPHLNGTLHKAFKMSAPEFSKQVQNLKPDLVLYDFLIPWAEKVARSQGVPGVPLLTSGAALFSYFFHFYKRPGHEFPFPAIRLGKREQDHMREMFGTEPTELDFLVPANAGIMLMCTSREIEAKYLDYCQKLTNVKVVPVGAPFQDPLTEDIYDPRLLRWLDTKPPNSVVYVSFGSEYFLSREQMQEVAFGLELSGVNFIWVARFPKGEEQNLEDVLPKGFLERVGDRGMVLSHLVPQAKILAHKSTGGFISHCGWNSVMESIDFGVPIIAMPMQWDQPINARLLVELGVAVEIRRDEDGRIHRDEIAQVLRDVISGPTGEILRANVRDIALRLRARREEEMNAAAEELLQLCRNRRALK

SEQ ID NO: 1387 - protein, 440 aa, Artificial Sequence
  engineered beta-1,2-glycosyltransferase encoded in plasmid pA35535
QTQQVLMFPWLALGHVNPFLRIAKQLADRGFVIYLVSTAINLELAKKRIPYKYSNSIHLVEYNLPELPELPPHLHTTNGLPPHLNGTLHKAFKMSAPEFSKQVQNLKPDLVLYDFLIPWAEKVARSQGVPGVPLLTSGAALFSYFFHFYKRPGHEFPFPAIRLGKREQDHMREMFGTEPTELDFLVPANAGIMLMCTSREIEAKYLDYCQKLTNVKVVPVGAPFQDPLTEDIYDPELLRWLDTKPPNSVVYVSFGSEYFLSREQMQEVAFGLELSGVNFIWVARFPKGEEQNLEDVLPKGFLERVGDRGMVLDHLVPQAKILAHKSTGGFISHCGWNSVMESIDFGVPIIAMPMQWDQPINARLLVELGVAVEIRRDEDGRIHRDEIAQVLRDVISGPTGEILRANVRDIALRLRARREEEMNAAAEELLQLCRNRRALK

SEQ ID NO: 1388 - protein, 440 aa, Artificial Sequence
  engineered beta-1,2-glycosyltransferase encoded in plasmid pA35536
QTQQVLMFPWLALGHVNPFLRIAKQLADRGFVIYLVSTAINLELAKKRIPYKYSNSIHLVEYHLPELPELPPHLHTTNGLPPHLNGTLHKALKMSAPEFSKQVQNLKPDLVLYDFLIPWAEKVARSQGVPGVPLLTSGAALFSYFFHFYKRPGHEFPFPAIRLSKREQDHMREMFGTEPTELDFLVPANAGIMLMNTSREIEAKYLDYCQKLTNVKVVPVGAPFQDPLTEDIYDPRLIRWLDTKPPNSVVYVSFGSEYFLSREQMEEVAFGLELSGVNFIWVARFPKGEEQNLEDVLPKGFLERVGDRGMVLSHLVPQAHILRHKSTGGFISHCGWNSVMESIDFGVPIIAMPMQWDQPINARLLVELGVAVEIRRDEDGRIHRDEIAQVLRDVISGPTGEILRANVRDIALRLRARREEEMNAAAEELLQLCRNRRALK

SEQ ID NO: 1389 - protein, 440 aa, Artificial Sequence
  engineered beta-1,2-glycosyltransferase encoded in plasmid pA35537
QTLQVTMFPWLGLGHVNPFLRIAKQLADMGMVIYVVSTAVNLESAKKRAPEYYSNSIHLVELHLPELPELPSHLHTTNGLPPHLNKLLHKALDMAAPNFSKILKNINPTLVIYDFLMPWAEKVALSQGVPAVPLLTSGAALFAYFFNFLTRPSEEFPFEAIYLKKRWQMKMREMFGTEPPEWDFKAPANCEIMLMNTSREIEAKYLDYCQKLTNVKVVPVGAPFQDPLTEDDDDPELMRWLDKKPPHSVVYVSFGSEAFLSREDIEEVAFGLELSGVNFIWVLRFPMGEEQRLEDVLPRGFLERVGDRGRVLDHLVPQAKILAHPSIGGFISHCGWNSVMESIAFGVPIIAMPMQWDQPINARLLVELGVAVEIPRREDGRVNRDEIARVLKDVIFGPTGEKLRANVADIAKKLRARREEEMNTFAEALLQLHRKRLAYV

SEQ ID NO: 1390 - protein, 440 aa, Artificial Sequence
  engineered beta-1,2-glycosyltransferase encoded in plasmid pA35538
QTLQVTMFPWLGLGHVNPFLRIAKQLADMGMVIYVVSTAVNLESAKKRAPEYYSNSIHLVELHLPELPELPSHLHTTNGLPPHLNKLLHKALDMAAPNFSKILKNINPTLVIYDFLMPWAEKVALSQGVPAVPLLTSGAALFAYFFNFLTRPSEEFPFEAIYPKKRWQMKMREMFGTEPPEWDFKAPANCEIMLMNTSREIEAKYLDYCQKLTNVKVVPVGAPFQDPLTEDDDDPELMRWLDKKPPHSVVYVSFGSEAFLSREDIEEVAFGLELSGVNFIWVLRFPMGEEQRLEDVLPRGFLERVGDRGRVLDHLVPQAKILAHPSIGGFISHCGWNSVMESIAFGVPIIAMPMQWDQPINARLLVELGVAVEIPRREDGRVNRDEIARVLKDVIFGPTGEKLRANVADIAKKLRARREEEMNTFAEALLQLHRKRLAYV

SEQ ID NO: 1391 - protein, 440 aa, Artificial Sequence
  engineered beta-1,2-glycosyltransferase encoded in plasmid pA35539
QTLQVTMFPWLGLGHVNPFLRIAKQLADMGMVIYVVSTAVNLESAKKRAPEYYSNSIHLVELHLPELPELPSHLHTTNGLPPHLNKTLHKALDMAAPNFSKILQNMNPTLVIYDFLMPWVEKVALSQGVPAVPLLTSGAALFAYFFNFLTRPQEEFPFEAIYEKKRWQMKMRESFGTEPPDEDFLAPANCQIMLMCTSREIEAKYLDYCQKLTNVKVVPVGAPFQDPLTEDDDDPELMRWLDTQPPHSVVYVSFGSEAFLSREDMEEVAFGLELSGVNFIWVVRFPMGEEQRLEDVLPRGFLERVGDRGRVLDHLVPQAKILAHPSIGGFISHCGWNSVMESIDFGVPIIAMPMQWDQPINARLLVELGVAVEIPRREDGRVNREEIARVLKDVIFGPTGEKLRANVADIAKRLRARREEEMNTFAEALLQLHRKRLAYV

SEQ ID NO: 1392 - protein, 440 aa, Artificial Sequence
  engineered beta-1,2-glycosyltransferase encoded in plasmid pA35540
QTLQVTMFPWLGLGHVNPFLRIAKQLADMGMVIYVVSTAVNLESAKKRAPEKYSNSIHLVELHLPELPELPSHLHTTNGLPPHLNKLLHKALDMSAPNFSKILQNINPTLVIYDFLMPWAEKVALSQGVPAVPLLTSGAALFAYFFNFLTRPSEEFPFEAIYLRKREQMKMREMFGTEPPDWDFLAPANCDIMLMCTSREIEAKYLDYCQKLTNVKVVPVGAPFQDPLTEDIDDPELMRWLDTKPEHSVVYVSFGSEAFLSREDMEEVAFGLELSGVNFIWVLRFPMGEEQRLEDVLPRGFLERVGDRGIVLDHLVPQAKILAHPSIGGFISHCGWNSVMESIAFGVPIIAMPMQWDQPINARLLVELGVAVEIPRREDGRVHRDEIARVLKDVIFGPTGEKLRANVADIAAKLRARREEEMNTFAEALLQLHRKRLAYV

SEQ ID NO: 1393 - protein, 440 aa, Artificial Sequence
  engineered beta-1,2-glycosyltransferase encoded in plasmid pA35541
QTLQVTMFPWLGLGHVNPFLRIAKQLADMGMVIYVVSTAVNLESAKKRAPEKYSNSIHLVELHLPELPELPSHLHTTNGLPPHLNKLLHKALDMSAPNFSKILQNINPTLVIYDFLMPWAEKVALSQGVPAVPLLTSGAALFAYFFNFLTRPSEEFPFEAIYPRKREQMKMREMFGTEPPDWDFLAPANCDIMLMNTSREIEAKYLDYCQKLTNVKVVPVGAPFQDPLTEDIDDPELMRWLDTKPEHSVVYVSFGSEAFLSREDMEEVAFGLELSGVNFIWVLRFPMGEEQRLEDVLPRGFLERVGDRGIVLDHLVPQAKILAHPSIGGFISHCGWNSVMESIAFGVPIIAMPMQWDQPINARLLVELGVAVEIPRREDGRVHRDEIARVLKDVIFGPTGEKLRANVADIAAKLRARREEEMNTFAEALLQLHRKRLAYV

SEQ ID NO: 1394 - protein, 440 aa, Artificial Sequence
  engineered beta-1,2-glycosyltransferase encoded in plasmid pA35542
QTLQVTMFPWLGLGHVNPFLRIAKQLADRGMVIYVVSTAVNLESAKKRAPEKYSNSIHLVELHLPELPELPSHLHTTNGLPPHLNKTLHKALDMAAPNFSKILQNMNPTLVIYDFLMPWAEKVALSQGVPAVPLLTSGAALFAYFFNFLTRPSEEFPFEAIRPKKRWQMKMREMFGTEPPDEDFLAPANAQIMLICTSREIEAKYLDYCQKLTNVKVVPVGAPFQDPLTEDIDDPELMRWLDTKPPHSVVYVSFGSEAFLSREDMEEVAFGLELSGVNFIWVVRFPMGEEQRLEDVLPRGFLERVGDRGRVLDHLVPQAKILAHPSVGGFISHCGWNSVMESIDFGVPIIAMPMQWDQPINARLLVELGVAVEIPRREDGRVNREEIARVLKDVIFGPTGEKLRANVADIAARLRARREEEMNTFAEALLQLHRKRLAYV

SEQ ID NO: 1395 - protein, 440 aa, Artificial Sequence
  engineered beta-1,2-glycosyltransferase encoded in plasmid pA35543
QTLQVTMFPWLGLGHVNPFLRIAKQLADMGMVIYVVSTAVNLESAKKRAPEKYSNSIHLVELHLPELPELPSHLHTTNGLPPHLNKLLHKALDMSAPNFSKILQNINPTLVIYDFLMPWAEKVALSQGVPAVPLLTSGAALFAYFFNFLTRPKEEFPFEAIYLSKREQDKMREMFGTEPPEEDFLAPANCQIMLMCTSREIEAKYLDYCQKLTNVKVVPVGAPFQDPLTEDIDDPELMRWLDTKPEHSVVYVSFGSEAFLSREDLEEVAFGLELSGVNFIWVLRFPMGEEQRLEDVLPRGFLERVGDRGRVLDHLVPQAKILNHPSIGGFISHCGWNSVMESIAFGVPIIAMPMQWDQPINARLLVELGVAVEIPRREDGRVHRDEIARVLKDVIFGPTGEKLRANVADIAARLRARREEEMNTFAEALLQLHRKRLAYV

SEQ ID NO: 1396 - protein, 440 aa, Artificial Sequence
  engineered beta-1,2-glycosyltransferase encoded in plasmid pA35544
QTLQVTMFPWLGLGHVNPFLRIAKQLADRGMVIYVVSTAVNLEQAKKRAPEKYSNSIHLVELHLPELPELPSHLHTTNGLPPHLNKTLHKALKMAAPNFSKILQNMNPTLVLYDFLLPWAEKVALSQGVPAVPLLTSGAALFAYFFNFLTRPKEEFPFEAIRLSKREQMKMREMFGTEPPEEDFLAPANADIMLICTSRDIEAKYLDYCQKLTNVKVVPVGAPFQDPLTEDIDDPELMRWLDTKPPHSVVYVSFGSEAFLSREDMEEVAFGLELSGVNFIWVVRFPMGEEQRLEDVLPRGFLERVGDRGRVLDHLVPQAKILNHPSVGGFISHCGWNSVMESIDFGVPIIAMPMQWDQPINARLLVELGVAVEIPRREDGRVNRDEIARVLKDVIFGPTGEKLRANVADIAARLRARREEEMNTFAEALLQLHRKRLAYV

SEQ ID NO: 1397 - protein, 440 aa, Artificial Sequence
  engineered beta-1,2-glycosyltransferase encoded in plasmid pA35545
QTLQVTMFPWLGLGHVNPFLRIAKQLADRGMVIYVVSTAVNLESAKKRAPEKYSNSIHLVELHLPELPELPSHLHTTNGLPPHLNKLLHKALKMSAPNFSKILQNINPTLVLYDFLMPWAEKVALSQGVPAVPLLTSGAALFAYFFNFLTRPGEEFPFEAIRLSKREQDKMREMFGTEPPEEDFLAPAQAQIMLMCTSREIEAKYLDYCQKLTNVKVVPVGAPFQDPLTEDIDDPELMRWLDTKPEHSVVYVSFGSEAFLSREDMEEVAFGLELSGVNFIWVLRFPMGEEQRLEDVLPRGFLERVGDRGIVLDHLVPQAHILNHPSIGGFISHCGWNSVMESIDFGVPIIAMPMQWDQPINARLLVELGVAVEIPRREDGRVHRDEIARVLKDVIFGPTGEKLRANVADIAARLRARREEEMNAFAEALLQLHRKRLAYV

SEQ ID NO: 1398 - protein, 440 aa, Artificial Sequence
  engineered beta-1,2-glycosyltransferase encoded in plasmid pA35546
QTLQVTMFPWLGLGHVNPFLRIAKQLADRGMVIYVVSTAVNLESAKKRAPEKYSNSIHLVELHLPELPELPSHLHTTNGLPPHLNKLLHKALKMSAPNFSKILQNINPTLVLYDFLMPWAEKVALSQGVPAVPLLTSGAALFAYFFNFLTRKGEEFPFEAIRLSKREQDKMREMFGTEPPEEDFLAPAQAQIMLMNTSREIEAKYLDYCQKLTNVKVVPVGAPFQDPLTEDIDDPELMRWLDTKPEHSVVYVSFGSEAFLSREDMEEVAFGLELSGVNFIWVLRFPMGEEQRLEDVLPRGFLERVGDRGIVLDHLVPQAHILNHPSIGGFISHCGWNSVMESIDFGVPIIAMPMQWDQPINARLLVELGVAVEIPRREDGRVHRDEIARVLKDVIFGPTGEKLRANVADIAARLRARREEEMNAFAEALLQLHRKRLAYV

SEQ ID NO: 1399 - protein, 440 aa, Artificial Sequence
  engineered beta-1,2-glycosyltransferase encoded in plasmid pA35547
QTLQVTMFPWLGLGHVNPFLRIAKQLADRGMVIYVVSTAVNLESAKKRIPEQYSNSIHLVELHLPELPELPSHLHTTNGLPPHLNKTLHKAFDMSKPNFSKILQNINPTLVIYDFLVPWAEKVARSFGVPAVPLLTSGAALFAYFFHFLTRPGEEFPFEAIRDRKREQWKMREQFGTEPPDWDFKAPANSDIMLICTSREIEAKYLDYCQKLTNVKVVPVGAPFQDPLTEDVDDPELMRWLDKKPPHSVVYVSFGSEAFLSKEDMEEVAFGLELSGVNFIWVARFPKGEEQRLEDVLPRGFLERVGDRGRVLDHLVPQAKILAHPSVGGFISHCGWNSVMESIHFGVPIIAMPMQWDQPINARLLVELGVAVEIPRREDGRVHRDEIARVLKDVVTGETGEKLRRNVAEIAERLRARREEEMNAFAEALLQLHRKRLAYV

SEQ ID NO: 1400 - protein, 440 aa, Artificial Sequence
  engineered beta-1,2-glycosyltransferase encoded in plasmid pA35548
QTLQVTMFPWLGLGHVNPFLRIAKQLADRGMVIYVVSTAVNLESAKKRIPEQYSNSIHLVELHLPELPELPSHLHTTNGLPPHLNKTLHKAFDMSKPNFSKILQNINPTLVIYDFLVPWAEKVARSFGVPAVPLLTSGAALFAYFFHFLTRPGEEFPFEAIRDRKREQWKMREQFGTEPPDWDFKAPANSDIMLICTSREIEAKYLDYCQKLTNVKVVPVGAPFQDPLTEDVDDPELMRWLDKKPEHSVVYVSFGSEAFLSKEDMEEVAFGLELSGVNFIWVARFPKGEEQRLEDVLPRGFLERVGDRGRVLDHLVPQAKILAHPSVGGFISHCGWNSVMESIHFGVPIIAMPMQWDQPINARLLVELGVAVEIPRREDGRVHRDEIARVLKDVVTGPTGEKLRRNVAEIAERLRARREEEMNAFAEALLQLHRKRLAYV

SEQ ID NO: 1401 - protein, 440 aa, Artificial Sequence
  engineered beta-1,2-glycosyltransferase encoded in plasmid pA35549
QTLQVTMFPWLGLGHVNPFLRIAKQLADRGMVIYVVSTAVNLESAKKRIPEQYSNSIHLVELHLPELPELPSHLHTTNGLPPHLNKTLHKAFDMSKPNFSKILQNINPTLVIYDFLVPWAEKVARSQGVPAVPLLTSGAALFAYFFNFLTRPGEEFPFEAIHDRKREEQRMREQFGTEPPDEDFKAPASSDIMLMCTSREIEAKYLDYCQKLTNVKVVPVGAPFQDPLTEDVDDPELMRWLDKKPEHSVVYVSFGSEAFLSKEDMEEVAFGLELSGVNFIWVARFPKGEEQRLEDVLPRGFLERVGDRGRVLDHLVPQAKILAHPSTGGFISHCGWNSVMESIHFGVPIIAMPMQWDQPINARLLVELGVAVEIPRREDGRVHREEIARVLKDVVTGPTGEKLRRNVAEIAERLRARREEEMNAFAEAELQLHRKRLAYV

SEQ ID NO: 1402 - protein, 440 aa, Artificial Sequence
  engineered beta-1,2-glycosyltransferase encoded in plasmid pA35550
QTLQVTMFPWLGLGHVNPFLRIAKQLADRGMVIYVVSTAVNLESAKKRIPEQYSNSIHLVELHLPELPELPSHLHTTNGLPPHLNKTLHKAFDMSKPNFSKILQNINPTLVIYDFLVPWAEKVARSQGVPAVPLLTSGAALFAYFFNFLTRPGEEFPFEAIHDRKREEQRMREQFGTEPPDEDFKAPASSDIMLMCTSREIEAKYLDYCQKLTNVKVVPVGAPFQDPLTEDVDDPELMRWLDKKPPHSVVYVSFGSEAFLSKEDMEEVAFGLELSGVNFIWVARFPKGEEQRLEDVLPRGFLERVGDRGRVLDHLVPQAKILAHPSCGGFISHCGWNSVMESIHFGVPIIAMPMQWDQPINARLLVELGVAVEIPRREDGRVHREEIARVLKDVVTGETGEKLRRNVAEIAERLRARREEEMNAFAEAELQLHRKRLAYV

SEQ ID NO: 1403 - protein, 440 aa, Artificial Sequence
  engineered beta-1,2-glycosyltransferase encoded in plasmid pA35551
QTLQVTMFPWLGLGHVNPFLRIAKQLADRGMVIYVVSTAVNLESAKKRIPEKYSNSIHLVELHLPELPELPSHLHTTNGLPPHLNKTLHKAFDMSAPNFSKILQNINPTLVIYDFLVPWAEKVALSQGVPAVPLLTSGAALFAYFFNFLTRPGEEFPFEAIRLRKREQWKMREMFGTEPPDEDFKAPASSQIMLICTSREIEAKYLDYCQKLTNVKVVPVGAPFQDPLTEDIDDPELMRWLDTKPEHSVVYVSFGSEAFLSREDMEEVAFGLELSGVNFIWVARFPKGEEQRLEDVLPRGFLERVGDRGRVLDHLVPQAKILNHPSVGGFISHCGWNSVMESIHFGVPIIAMPMQWDQPINARLLVELGVAVEIPRREDGRVHREEIARVLKDVITGPTGEKLRANVADIAERLRARREEEMNAFAEAELQLHRKRLAYV

SEQ ID NO: 1404 - protein, 440 aa, Artificial Sequence
  engineered beta-1,2-glycosyltransferase encoded in plasmid pA35552
QTLQVTMFPWLGLGHVNPFLRIAKQLADRGMVIYVVSTAVNLESAKKRIPEKYSNSIHLVELHLPELPELPSHLHTTNGLPPHLNKTLHKAFDMSAPNFSKILQNINPTLVIYDFLVPWAEKVALSQGVPAVPLLTSGAALFAYFFNFLTRPGEEFPFEAIRPRKREQWKMREMFGTEPPDEDFKAPASSQIMLICTSREIEAKYLDYCQKLTNVKVVPVGAPFQDPLTEDIDDPELMRWLDTKPEHSVVYVSFGSEAFLSREDMEEVAFGLELSGVNFIWVARFQKGEEQRLEDVLPRGFLERVGDRGRVLDHLVPQAKILNHPSVGGFISHCGWNSVMESIHFGVPIIAMPMQWDQPINARLLVELGVAVEIPRREDGRVHREEIARVLKDVITGPTGEKLRANVADIAERLRARREEEMNAFAEAELQLHRKRLAYV

SEQ ID NO: 1405 - protein, 440 aa, Artificial Sequence
  engineered beta-1,2-glycosyltransferase encoded in plasmid pA35553
QTLQVTMFPWLGLGHVNPFLRIAKQLADRGMVIYVVSTAVNLESAKKRIPEKYSNSIHLVELHLPELPELPSHLHTTNGLPPHLNKTLHKAFDMSAPNFSKILQNINPTLVIYDFLVPWAEKVALSHGVPAVPLLTSGAALFAYFFNFLTRPGEEFPFEAIRLRKRWQARMREMFGTEPPDEDFKAPANSQIMLMCTSREIEAKYLDYCQKLTNVKVVPVGAPFQDPLTEDIDDPELMRWLDTKPEHSVVYVSFGSEAFLSREDMEEVAFGLELSGVNFIWVARFPKGEEQRLEDVLPRGFLERVGDRGRVLDHLVPQAKILNHPSVGGFISHCGWNSVMESIDFGVPIIAMPMQWDQPINARLLVELGVAVEIPRREDGRVHREEIARVLKDVITGPTGEKLRANVADIAERLRARREEEMNAFAEALLQLHRKRLAYV

SEQ ID NO: 1406 - protein, 440 aa, Artificial Sequence
  engineered beta-1,2-glycosyltransferase encoded in plasmid pA35554
QTLQVTMFPWLGLGHVNPFLRIAKQLADRGMVIYVVSTAVNLESAKKRIPEKYSNSIHLVELHLPELPELPSHLHTTNGLPPHLNKTLHKAFDMSAPNFSKILQNINPTLVIYDFLVPWAEKVALSHGVPAVPLLTSGAALFAYFFNFLTRPGEEFPFEAIRPRKRWQARMREMFGTEPPDEDFKAPANSQIMLMCTSREIEAKYLDYCQKLTNVKVVPVGAPFQDPLTEDIDDPELMRWLDTKPEHSVVYVSFGSEAFLSREDMEEVAFGLELSGVNFIWVARFQKGEEQRLEDVLPRGFLERVGDRGRVLDHLVPQAKILNHPSVGGFISHCGWNSVMESIDFGVPIIAMPMQWDQPINARLLVELGVAVEIPRREDGRVHREEIARVLKDVITGPTGEKLRANVADIAERLRARREEEMNAFAEALLQLHRKRLAYV

SEQ ID NO: 1407 - protein, 440 aa, Artificial Sequence
  engineered beta-1,2-glycosyltransferase encoded in plasmid pA35555
QTLQVTMFPWLGLGHVNPFLRIAKQLADRGMVIYVVSTAVNLEQAKKRIPEKYSNSIHLVELHLPELPELPSHLHTTNGLPPHLNKTLHKALDMSAPNFSKILQNINPTLVIYDFLVPWAEKVALSQGVPAVPLLTSGAALFAYFFNFLTRPGEEFPFEAIRWRKREQWKMREMFGTEPPDEDFKAPANAQIMLMCTSREIEAKYLDYCQKLTNVKVVPVGAPFQDPLTEDIDDPELMRWLDTKPEHSVVYVSFGSEAFLSREDMEEVAFGLELSGVNFIWVARFPKGEEQRLEDVLPRGFLERVGDRGRVLDHLVPQAHILNHPSVGGFISHCGWNSVMESIHFGVPIIAMPMQWDQPINARLLVELGVAVEIPRREDGRVHREEIARVLKDVISGPTGEKLRANVADIAARLRARREEEMNAFAEALLQLHRKRLAYV

SEQ ID NO: 1408 - protein, 440 aa, Artificial Sequence
  engineered beta-1,2-glycosyltransferase encoded in plasmid pA35556
QTLQVTMFPWLGLGHVNPFLRIAKQLADRGMVIYVVSTAVNLEQAKKRIPEKYSNSIHLVELHLPELPELPSHLHTTNGLPPHLNKTLHKALDMSAPNFSKILQNINPTLVIYDFLVPWAEKVALSQGVPAVPLLTSGAALFAYFFNFLTRPGEEFPFEAIRWRKREQAKMREMFGTEPPEEDFKAPANAQIMLMCTSREIEAKYLDYCQKLTNVKVVPVGAPFQDPLTEDIDDPELMRWLDTKPEHSVVYVSFGSEAFLSREDMEEVAFGLELSGVNFIWVARFPKGEEQRLEDVLPRGFLERVGDRGRVLDHLVPQAKILNHPSTGGFISHCGWNSVMESIDFGVPIIAMPMQWDQPINARLLVELGVAVEIPRREDGRVHREEIARVLKDVISGPTGEKLRANVADIAARLRARREEEMNAFAEALLQLHRKRLAYV

SEQ ID NO: 1409 - protein, 440 aa, Artificial Sequence
  engineered beta-1,2-glycosyltransferase encoded in plasmid pA35557
QTLRVLMFPWLALGHVNPFLRIAKQLADRGFVIHLVSTAVVLESAKKRLPEKYSNSIHLVELHLPLLPELPPHYHTTNGLPPHLNGTLKKALQMAAPEFSKILQNLKPDLVLFDFLQPWAEKVALELGIPAVPLLTSGAALFAYFFHFLKRPEVEFPFPDIYLTKRFQDKMREMFGTAPTWLDFRAPQNAHIMLMCTSREIEAKYLDYCQKLSGVKVVPVGPPVQDPLTEDISDPELIRWLDKKPENSVVYVSFGSEYFLSREDMQEVAFGLELSNVNFIWVARFPKGVEQNLEDVLPKGFLERVKDRGVVLDHLVPQAHILAHPSVGGFISHCGWNSVMESLDFGVPIIAMPMQWDQPINARLLVELGVAVEIVRQEDGRIHREAIAQVLKDVIYGPTGEKLRRNVRDIAKRLRKRREVEMTEAALELIRLCRNRNAYK

SEQ ID NO: 1410 - protein, 440 aa, Artificial Sequence
  engineered beta-1,2-glycosyltransferase encoded in plasmid pA35558
QTLRVLMFPWLALGHVNPFLRIAKQLADRGFVIHLVSTAVVLESAKKRLPEKYSNSIHLVELHLPLLPELPPHYHTTNGLPPHLNGTLKKALQMAAPEFSKILQNLKPDLVLFDFLQPWAVKVALELGIPAVPLLTSGAALFAYFFHFLKRPEEEFPFPDLVLSKRFQDKMREMFGTAPTYLDFRFPQNAHIMLMNTSREIEAKYLDYCQKLTNVKVLPVGPPFQDPLTEDISDPELIRWLDTKPENSVVYVSFGSEYFLSREDMQEVAFGLELSNVNFIWVLRFPKGVEQNLEDVLPKGFLERVKDRGIVLDHLVPQAHILAHPSTGGFISHCGWNSVMESLCFGVPIIAMPMQWDQPINARLLVELGVAVEIVRQEDGRIHREAIAQVLKDVIYGPTGEKLRRNVREIAKKLRARREVEMTRAALELIRLCRNRNAYK

SEQ ID NO: 1411 - protein, 440 aa, Artificial Sequence
  engineered beta-1,2-glycosyltransferase encoded in plasmid pA35559
QTLRVLMFPWLALGHVNPFLRIAKQLADRGFVIHLVSTAVVLESAKKRLPEKYSNSIHLVELHLPLLPELPPHYHTTNGLPPHLNGTLKKALQMAAPEFSKILQNLKPDLVLFDFLQPWAVKVALELGIPAVPLLTSGAALFAYFFHFLKRPEEEFPFPDLVLSKRFQDKMREMFGTAPTYLDFRFPQNAHIMLMCTSREIEAKYLDYCQKLTNVKVLPVGPPFQDPLTEDISDPELIRWLDTKPENSVVYVSFGSEYFLSREDMQEVAFGLELSNVNFIWVLRFPKGVEQNLEDVLPKGFLERVKDRGIVLDHLVPQAHILAHPSTGGFISHCGWNSVMESLDFGVPIIAMPMQWDQPINARLLVELGVAVEIVRQEDGRIHREAIAQVLKDVIYGPTGEKLRRNVREIAKKLRARREVEMTRAALELIRLCRNRNAYK

SEQ ID NO: 1412 - protein, 440 aa, Artificial Sequence
  engineered beta-1,2-glycosyltransferase encoded in plasmid pA35560
QTLRVLMFPWLALGHVNPFLRIAKQLADRGFVIHLVSTAVVLESAKKRLPEKYSNSIHLVELHLPLLPELPPHYHTTNGLPPHLNGTLKEALQMAAPEFSKILQNLKPDLVLYDFLQPWAEKVALELGIPAVPLLTSGAALFAYFFHFLKRPEVEFPFPDIYLSKRFQDKMREMFGTAPTWLDFRAPMNADIMLMCTSREIEAKYLDYCQKLSNVKVVPVGPPVQDPLTEDISDPELIRWLDTKPENSVVYVSFGSEYFLSREDMQEVAFGLELSNVNFIWVARFPKGVEQNLEDVLPKGFLERVKDRGVVLDHLVPQAHILAHPSTGGFISHCGWNSVMESLDFGVPIIAMPMQWDQPINARLLVELGVAVEIVRQEDGRIHREAIAQVLKDVIYGPTGEKLRRNVRDIAKRLRKRREVEMTIAMLELIRLCRNRNAYK

SEQ ID NO: 1413 - protein, 440 aa, Artificial Sequence
  engineered beta-1,2-glycosyltransferase encoded in plasmid pA35561
QTLRVLMFPWLALGHVNPFLRIAKQLADRGFVIHLVSTAVVLESAKKRLPEKYSNSIHLVELPLPLLPELPPHYHTTNGLPPHLNGTLKKALQMAAPEFSKILQNLKPDLVLFDFLQPWAEKVALELGIPAVPLLTSGAALFAYFFHFLKRPEEEFPFPDIYLSKRFQDKMREMFGTAPTYLDFRAPENAHIMLMCTSREIEAKYLDYCQKLTNVKVVPVGPPFQDPLTEDISDPELIRWLDTKPENSVVYVSFGSEYFLSREDMQEVAFGLELSNVNFIWVLRFPKGVEQNLEDVLPKGFLERVKDRGRVLDHLVPQAHILAHPSTGGFISHCGWNSVMESLDFGVPIIAMPMQWDQPINARLLVELGVAVEIVRQEDGRIHREAIAQVLKDVIYGPTGEKLRANVREIAKRLRARREVEMTIAALELIRLCRNRNAYK

SEQ ID NO: 1414 - protein, 440 aa, Artificial Sequence
  engineered beta-1,2-glycosyltransferase encoded in plasmid pA35562
QTLRVLMFPWLALGHVNPFLRIAKQLADRGFVIHLVSTAVVLESAKKRLPEKYSNSIHLVELALPLLPELPPHYHTTNGLPPHLNGTLKKALQMAAPEFSKILQNLKPDLVLFDFLQPWAEKVALELGIPAVPLLTSGAALFAYFFHFLKRPEEEFPFPDIYLSKRFQDKMREMFGTAPTYLDFRAPENAHIMLMCTSREIEAKYLDYCQKLTNVKVVPVGPPFQDPLTEDISDPELIRWLDTKPENSVVYVSFGSEYFLSREDMQEVAFGLELSNVNFIWVLRFPKGVEQNLEDVLPKGFLERVKDRGRVLDHLVPQAHILAHPSTGGFISHCGWNSVMESLDFGVPIIAMPMQWDQPINARLLVELGVAVEIVRQEDGRIHREAIAQVLKDVIYGPTGEKLRANVREIAKRLRARREVEMTIAALELIRLCRNRNAYK

SEQ ID NO: 1415 - protein, 440 aa, Artificial Sequence
  engineered beta-1,2-glycosyltransferase encoded in plasmid pA35563
QTLRVLMFPWLALGHVNPFLRIAKQLADRGFVIHLVSTAVVLESAKKRLPEKYSNSIHLVELHLPLLPELPPHYHTTNGLPPHLNGTLKKALQMAAPEFSKILQNLKPDLVLYDFLQPWAEKVALELGIPAVPLLTSGAALFAYFFHFLKRPEEEFPFPAIVLSKRFQDKMREMFGTAPTYLDFRAPQNAHIMLMNTSREIEAKYLDYCQKLTNVKVVPVGPPFQDPLTEDISDPELIRWLDTKPENSVVYVSFGSEYFLSREDMQEVAFGLELSNVNFIWVARFPKGVEQNLEDVLPKGFLERVKDRGVVLDHLVPQAHILAHPSTGGFISHCGWNSVMESLDFGVPIIAMPMQWDQPINARLLVELGVAVEIVRQEDGRIHREAIAQVLRDVIYGPTGEKIRANVRDIAKRLRARREVEMTIAALELIRLCRNRNAYK

SEQ ID NO: 1416 - protein, 440 aa, Artificial Sequence
  engineered beta-1,2-glycosyltransferase encoded in plasmid pA35564
QTLRVLMFPWLALGHVNPFLRIAKQLADRGFVIHLVSTAVVLESAKKRLPEKYSNSIHLVELHLPLLPELPPHYHTTNGLPPHLNGTLKKALQMAAPEFSKILQNLKPDLVLYDFLQPWAEKVALELGIPAVPLLTSGAALFAYFFHFLKRPEEEFPFPAIVLSKRFQDKMREMFGTAPTYLDFRAPQNAHIMLMCTSREIEAKYLDYCQKLTNVKVVPVGPPFQDPLTEDISDPELIRWLDTKPENSVVYVSFGSEYFLSREDMQEVAFGLELSNVNFIWVARFPKGVEQNLEDVLPKGFLERVKDRGVVLDHLVPQAHILAHPSTGGFISHCGWNSVMESLDFGVPIIAMPMQWDQPINARLLVELGVAVEIVRQEDGRIHREAIAQVLRDVIYGPTGEKIRANVRDIAKRLRARREVEMTIAALELIRLCRNRNAYK

SEQ ID NO: 1417 - protein, 440 aa, Artificial Sequence
  engineered beta-1,2-glycosyltransferase encoded in plasmid pA35565
QTLRVLMFPWLALGHVNPFLRIAKQLADRGFVIHLVSTAVVLESAKKRLPEKYSNSIHLVELHLPLLPELPPHYHTTNGLPPHLNGTLKKALQMSAPEFSKILQNLKPDLVLYDFLQPWAEKVALELGIPAVPLLTSGAALFAYFFHFLKRPGHEFPFPAIRLSKRYQDKMREMFGTAPTYLDFRAPQNADIMLMCTSREIEAKYLDYCQKLTNVKVVPVGPPFQDPLTEDISDPELIRWLDTKPENSVVYVSFGSEYFLSREDMQEVAFGLELSNVNFIWVARFPKGVEQNLEDVLPKGFLERVKDRGVVLDHLVPQAHILAHPSTGGFISHCGWNSVMESLDFGVPIIAMPMQWDQPINARLLVELGVAVEIVRQEDGRIHREAIAQVLRDVIYGPTGEKIRANVRDIAKRLRARREVEMTIAALELIRLCRNRNAYK

SEQ ID NO: 1418 - protein, 440 aa, Artificial Sequence
  engineered beta-1,2-glycosyltransferase encoded in plasmid pA35566
QTLRVLMFPWLALGHVNPFLRIAKQLADRGFVIHLVSTAVVLESAKKRLPEKYSNSIHLVELPLPLLPELPPHYHTTNGLPPHLNGTLKKALQMSAPEFSKILQNLKPDLVLYDFLQPWAEKVALELGIPAVPLLTSGAALFAYFFHFLKRPGEEFPFPAIYLSKRWQDKMREMFGTAPTWLDFRAPQNADIMLMCTSREIEAKYLDYCQKLTNVKVVPVGPPVQDPLTEDISDPELIRWLDTKPENSVVYVSFGSEYFLSREDMEEVAFGLELSNVNFIWVARFPKGVEQNLEDVLPKGFLERVKDRGRVLDHLVPQAHILAHPSTGGFISHCGWNSVMESLDFGVPIIAMPMQWDQPINARLLVELGVAVEIVRQEDGRIHREAIAQVLKDVIYGPTGEKLRANVRDIAKRLRARREVEMTIAALELIRLCRNRNAYK

SEQ ID NO: 1419 - protein, 440 aa, Artificial Sequence
  engineered beta-1,2-glycosyltransferase encoded in plasmid pA35567
QTLRVLMFPWLALGHVNPFLRIAKQLADRGFVIHLVSTAVVLESAKKRLPEKYSNSIHLVELALPLLPELPPHYHTTNGLPPHLNGTLKKALQMSAPEFSKILQNLKPDLVLYDFLQPWAEKVALELGIPAVPLLTSGAALFAYFFHFLKRPGEEFPFPAIYLSKRWQDKMREMFGTAPTWLDFRAPQNADIMLMCTSREIEAKYLDYCQKLTNVKVVPVGPPVQDPLTEDISDPELIRWLDTKPENSVVYVSFGSEYFLSREDMEEVAFGLELSNVNFIWVARFPKGVEQNLEDVLPKGFLERVKDRGRVLDHLVPQAHILAHPSTGGFISHCGWNSVMESLDFGVPIIAMPMQWDQPINARLLVELGVAVEIVRQEDGRIHREAIAQVLKDVIYGPTGEKLRANVRDIAKRLRARREVEMTIAALELIRLCRNRNAYK

SEQ ID NO: 1420 - protein, 440 aa, Artificial Sequence
  engineered beta-1,2-glycosyltransferase encoded in plasmid pA35568
QTLRVLMFPWLALGHVNPFLRIAKQLADRGFVIHLVSTAVVLESAKKRLPEKYSNSIHLVELHLPLLPELPPHYHTTNGLPPHLNGTLKKALQMSAPEFSKILQNLKPDLVLYDFLQPWAEKVALELGIPAVPLLTSGAALFAYFFHFLKRPGHEFPFPAIRLSKRWQDKMREMFGTAPTYLDFRAPQNAHIMLMCTSREIEAKYLDYCQKLTNVKVVPVGPPFQDPLTEDISDPELIRWLDTKPENSVVYVSFGSEYFLSREDMQEVAFGLELSNVNFIWVARFPKGVEQNLEDVLPKGFLERVKDRGVVLDHLVPQAHILAHPSTGGFISHCGWNSVMESLDFGVPIIAMPMQWDQPINARLLVELGVAVEIVRQEDGRIHREAIAQVLRDVIYGPTGEKIRANVRDIAKRLRARREVEMTIAALELIRLCRNRNAYK

SEQ ID NO: 1421 - protein, 440 aa, Artificial Sequence
  engineered beta-1,2-glycosyltransferase encoded in plasmid pA35569
QTLRVLMFPWLALGHVNPFLRIAKQLADRGFVIHLVSTAVVLESAKKRLPEKYSNSIHLVELPLPLLPELPPHYHTTNGLPPHLNGTLKKALQMSAPEFSKILQNLKPDLVLYDFLQPWAEKVALELGIPAVPLLTSGAALFAYFFNFLKRPGHEFPFPAIRLSKRWQDKMREMFGTAPTELDFRAPQNAHIMLMCTSREIEAKYLDYCQKLTNVKVVPVGPPVQDPLTEDISDPELIRWLDTKPENSVVYVSFGSEYFLSREDMEEVAFGLELSNVNFIWVARFPKGVEQNLEDVLPKGFLERVKDRGRVLDHLVPQAHILAHPSTGGFISHCGWNSVMESLDFGVPIIAMPMQWDQPINARLLVELGVAVEIVRQEDGRIHREAIAQVLKDVIYGPTGEKLRANVRDIAKRLRARREVEMTIAALELIRLCRNRNAYK

SEQ ID NO: 1422 - protein, 440 aa, Artificial Sequence
  engineered beta-1,2-glycosyltransferase encoded in plasmid pA35570
QTLRVLMFPWLALGHVNPFLRIAKQLADRGFVIHLVSTAVVLESAKKRIPEKYSNSIHLVELHLPLWPELPPHYHTTNGLPPHLNGTLKKALQMARPEFSKILQNLKPDLVLYDFLQPWAAKVALELGIPAVPLLTSGAALFAYFFHFLKRPGVEFPFPAIYLSKRYQDKMREMFGTMPTELDFRAPWNCQIMLMCTSREIEAKYLDYCQKLTNVKVVPVGPPFQDPLTEDISDPELIRWLDQKPPNSVVYVSFGSEYFLSREDMQEVAHGLELSNVNFIWVARFPKGVEQNLEEVLPKGFLERVRDRGRVLDHLVPQAHILAHPSTGGFISHCGWNSVMESLSFGVPIIAMPMQWDQPINARLLVELGVAVEIVRQEDGRIHREAIAQVLKDVISGPEGEKLRANCREIAKRLRKRREVEITIAALELIRLCRNRNAYK

SEQ ID NO: 1423 - protein, 440 aa, Artificial Sequence
  engineered beta-1,2-glycosyltransferase encoded in plasmid pA35571
QTLRVLMFPWLALGHVNPFLRIAKQLADRGFVIHLVSTAVVLESAKKRIPEKYSNSIHLVELHLPLWPELPPHYHTTNGLPPHLNGTLKKALQMARPEFSKILQNLKPDLVLYDFLQPWAAKVALELGIPAVPLLTSGAALFAYFFHFLKRPGVEFPFPAIYLSKRYQDKMREMFGTMPTELDFRAPWNAQIMLMCTSREIEAKYLDYCQKLTNVKVVPVGPPFQDPLTEDISDPELIRWLDQKPPNSVVYVSFGSEYFLSREDMQEVAHGLELSNVNFIWVARFPKGVEQNLEEVLPKGFLERVRDRGRVLDHLVPQAHILAHPSTGGFISHCGWNSVMESLSFGVPIIAMPMQWDQPINARLLVELGVAVEIVRQEDGRIHREAIAQVLKDVISGPEGEKLRANVREIAKRLRKRREVEITIAALELIRLCRNRNAYK

SEQ ID NO: 1424 - protein, 440 aa, Artificial Sequence
  engineered beta-1,2-glycosyltransferase encoded in plasmid pA35572
QTLRVLMFPWLALGHVNPFLRIAKQLADRGFVIHLVSTATVLESAKKRIPEKYSNSIHLVELHLPLWPELPPHYHTTNGLPPHLNGTLKKALQMAAPEFSKILQNLKPDLVLYDFLQPWAAKVALELGIPAVPLLTSGAALFAYFFHFLKRPGVEFPFPAIYLSKREQDKMREMFGTMPTELDFRAPWNCQIMLMCTSREIEAKYLDYCQKLTNVKVVPVGPPFQDPLTEDISDPELIRWLDQKPPNSVVYVSFGSEYFLSREDMQEVAHGLELSNVNFIWVARFPKGVEQNLEEVLPKGFLERVKDRGLVLDHLVPQAHILAHPSTGGFISHCGWNSVMESLSFGVPIIAMPMQWDQPINARLLVELGVAVEIVRQEDGRIHREAIAQVLKDVISGPEGEKLRANVREIAKRLRKRREVEMTIAALELIRLCRNRNAYK

SEQ ID NO: 1425 - protein, 440 aa, Artificial Sequence
  engineered beta-1,2-glycosyltransferase encoded in plasmid pA35573
QTLRVLMFPWLALGHVNPFLRIAKQLADRGFVIHLVSTATVLESAKKRIPEKYSNSIHLVELHLPLWPELPPHYHTTNGLPPHLNGTLKKALQMAAPEFSKILQNLKPDLVLYDFLQPWAAKVALELGIPAVPLLTSGAALFAYFFHFLKRPGVEFPFPAIYLSKREQDKMREMFGTMPTELDFRAPWNAQIMLMCTSREIEAKYLDYCQKLTNVKVVPVGPPFQDPLTEDISDPELIRWLDQKPPNSVVYVSFGSEYFLSREDMQEVAHGLELSNVNFIWVARFPKGVEQNLEEVLPKGFLERVKDRGLVLDHLVPQAHILAHPSTGGFISHCGWNSVMESLSFGVPIIAMPMQWDQPINARLLVELGVAVEIVRQEDGRIHREAIAQVLKDVISGPEGEKLRANVREIAKRLRKRREVEMTIAALELIRLCRNRNAYK

SEQ ID NO: 1426 - protein, 440 aa, Artificial Sequence
  engineered beta-1,2-glycosyltransferase encoded in plasmid pA35574
QTLRVLMFPWLALGHVNPFLRIAKQLADRGFVIHLVSTAVVLESAKKRIPEKYSNSIHLVELALPLWPELPPHYHTTNGLPPHLNGTLKKALQMARPEFSKILQNLKPDLVLYDFLQPWAEKVALELGIPAVPLLTSGAALFAYFFHFLKRPGHEFPFPAIRLSKRYQDKMREMFGTMPTELDFRAPWNAQIMLMCTSREIEAKYLDYCQKLTNVKVVPVGPPFQDPLTEDISDPELIRWLDTKPENSVVYVSFGSEYFLSREDMEEVAFGLELSNVNFIWVARFPKGVEQNLEDVLPKGFLERVGDRGRVLDHLVPQAHILAHPSTGGFISHCGWNSVMESIDFGVPIIAMPMQWDQPINARLLVELGVAVEIVRQEDGRIHREAIAQVLKDVISGPTGEKLRANVREIAKRLRARREVEITIAALELIRLCRNRNAYK

SEQ ID NO: 1427 - protein, 440 aa, Artificial Sequence
  engineered beta-1,2-glycosyltransferase encoded in plasmid pA35575
QTLRVLMFPWLALGHVNPFLRIAKQLADRGFVIHLVSTAVVLESAKKRIPEKYSNSIHLVELALPLWPELPPHYHTTNGLPPHLNGTLKKALQMAAPEFSKILQNLKPDLVLYDFLQPWAEKVALELGIPAVPLLTSGAALFAYFFHFLKRPGHEFPFPAIRLSKREQDKMREMFGTMPTELDFRAPWNAQIMLMCTSREIEAKYLDYCQKLTNVKVVPVGPPFQDPLTEDISDPELIRWLDTKPENSVVYVSFGSEYFLSREDMEEVAFGLELSNVNFIWVARFPKGVEQNLEDVLPKGFLERVGDRGRVLDHLVPQAHILAHPSTGGFISHCGWNSVMESLDFGVPIIAMPMQWDQPINARLLVELGVAVEIVRQEDGRIHREAIAQVLKDVISGPTGEKLRANVREIAKRLRARREVEITIAALELIRLCRNRNAYK

SEQ ID NO: 1428 - protein, 440 aa, Artificial Sequence
  engineered beta-1,2-glycosyltransferase encoded in plasmid pA35576
QTLRVLMFPWLALGHVNPFLRIAKQLADRGFVIHLVSTAVVLESAKKRIPEKYSNSIHLVELALPLWPELPPHYHTTNGLPPHLNGTLKKALQMARPEFSKILQNLKPDLVLYDFLQPWAEKVALELGIPAVPLLTSGAALFAYFFHFLKRPGHEFPFPAIRLSKRWQDKMREMFGTMPTELDFRAPWNAQIMLMCTSREIEAKYLDYCQKLTNVKVVPVGPPFQDPLTEDISDPELIRWLDTKPENSVVYVSFGSEYFLSREDMEEVAFGLELSNVNFIWVARFPKGVEQNLEDVLPKGFLERVGDRGRVLDHLVPQAHILAHPSTGGFISHCGWNSVMESLDFGVPIIAMPMQWDQPINARLLVELGVAVEIVRQEDGRIHREAIAQVLKDVISGPTGEKLRANVREIAKRLRARREVEITIAALELIRLCRNRNAYK

SEQ ID NO: 1429 - protein, 440 aa, Artificial Sequence
  engineered beta-1,2-glycosyltransferase encoded in plasmid pA35577
QTLRVLMFPWLALGHINPFLRIAKQLADRGFVIYLCSTAINLESIKKRLPEQYSNSIHLVELHLPELPELPPHYHTTNGLPPHLNGTLKKALDMAAPNFSKILQNSKPDWVLYDFLQPWAAKVALEHGIPAVKLLTSGAALFAYFFHFLKLPKNEFPFPEIYLRKHEQVYMREMMGKDPKTEDFVAPGNAQIMLMCTSRVIEAKYMDYLDELFNKKVVPVGPVFQDPLTEDDDNPELIKWLDTQPENSVVFVSFGSEYFLSQEDMQEVAFGLELSNVNFIWVARFPKGENLNLEDALPEGFLERIGDRGRVLDHLVPQAKILAHPSTAGFVSHCGWNSVMESIDFGVPIIAMPMQWDQPINARLLVELGVAIEVQRDKDGKIHREEIAKVLKDVISGPTGEELRAKVRDISKLLRARREEEMEKAAEELIQLCRNRNAYK

SEQ ID NO: 1430 - protein, 440 aa, Artificial Sequence
  engineered beta-1,2-glycosyltransferase encoded in plasmid pA35578
QTLRVLMFPWLALGHINPFLRIAKQLADRGFVIYLCSTAINLESIKKRLPEQYSNSIHLVELHLPELPELPPHYHTTNGLPPHLNGTLKKALDMAAPNFSKILQNSKADWVLYDFLQPWAAKVALEHGIPAVCLLTSGAALFAYFFHFLKLPKNEFPFPEIYLRKHEQVYMREMMGKDPKTEDFVAPGNAQIMLMCTSRVIEAKYMDYLDELYNKKVVPVGPVFQDPLTEDDDNPELIKWLDTQPPNSVVFVSFGSEYFLSQEDMQEVAFGLELSNVNFIWVARFPKGENLNLEDALPEGFLERIGDRGRVLDHLVPQAKILAHPSTAGFVSHCGWNSVMESIDFGVPIIAMPMQWDQPINARLLVELGVAIEVQRDKDGKIHREEIAKVLKDVISGPTGEELRAKVRDISKLLRARREEEMEKAAEELIQLCRNRNAYK

SEQ ID NO: 1431 - protein, 440 aa, Artificial Sequence
  engineered beta-1,2-glycosyltransferase encoded in plasmid pA35579
QTLRVLMFPWLALGHINPFLRIAKQLADRGFVIYLCSTAINLESIKKRLPEQYSNSIHLVELHLPELPELPPHYHTTNGLPPHLNGTLKKALDMAAPNFSKILQNSKPDWVLYDFLQPWAAKVALEHGIPAVKLLTSGAALFAYFFHFLKLPKNEFPFPEIYLRKHEQVYMREMMGKDPKTEDFVAPGNAQIMLMCTSRVIEAKYMDYLDELYNKKVVPVGPVFQDPLTEDDDNPELIKWLDTQPENSVVFVSFGSEYFLSQEDMQEVAFGLELSNVNFIWVARFPKGENLNLEDALPEGFLERIGDRGRVLDHLVPQAKILAHPSTAGFVSHCGWNSVMESIDFGVPIIAMPMQWDQPINARLLVELGVAIEVQRDKDGKIHREEIAKVLKDVISGPTGEELRAKVRDISKLLRARREEEMEKAAEELIQLCRNRNAYK

SEQ ID NO: 1432 - protein, 440 aa, Artificial Sequence
  engineered beta-1,2-glycosyltransferase encoded in plasmid pA35580
QTLRVLMFPWLALGHINPFLRIAKQLADRGFVIYLCSTAINLESIKKRLPEKYSNSIHLVELHLPELPELPPHYHTTNGLPPHLNGTLKKALDMSAPNFSKILQNLKADLVLYDFLQPWAEKVALEHGIPAVCLLTSGAALFSYFFHFLKLPKHEFPFPEIYLRKYEQVYMREMMGKEPKTEDFLAPGNAQIMLMCTSRVIEAKYMDYLSELTNKKVVPVGPVFQDPLTEDDDNPELIKWLDTQPENSVVFVSFGSEYFLSREDMREVAFGLELSNVNFIWVARFPKGEELNLEDALPKGFLERIGDRGRVLDHLVPQAKILAHPSTAGFVSHCGWNSVMESIDFGVPIIAMPMQWDQPINARLLVELGVAVEVVRDKDGKIHREEIAKTLKDVISGPTGEELRAKVRDISKRLRARREEEMEKAAEELIQLCRNRNAYK

SEQ ID NO: 1433 - protein, 440 aa, Artificial Sequence
  engineered beta-1,2-glycosyltransferase encoded in plasmid pA35581
QTLRVLMFPWLALGHINPFLRIAKQLADRGFVIYLCSTAINLESIKKRLPEKYSNSIHLVELHLPELPELPPHYHTTNGLPPHLNGTLKKALDMSAPNFSKILQNLKPDLVLYDFLQPWAEKVALEHGIPAVKLLTSGAALFSYFFHFLKLPKHEFPFPEIYLRKYEQVYMREMMGKEPKTEDFLAPGNAQIMLMCTSRVIEAKYMDYLSELTNKKVVPVGPVFQDPLTEDDDNPELIKWLDTQPENSVVFVSFGSEYFLSREDMREVAFGLELSNVNFIWVARFPKGEELNLEDALPKGFLERIGDRGRVLDHLVPQAKILAHPSTAGFVSHCGWNSVMESIDFGVPIIAMPMQWDQPINARLLVELGVAVEVVRDKDGKIHREEIAKTLKDVISGPTGEELRAKVRDISKRLRARREEEMEKAAEELIQLCRNRNAYK

SEQ ID NO: 1434 - protein, 440 aa, Artificial Sequence
  engineered beta-1,2-glycosyltransferase encoded in plasmid pA35582
QTLRVLMFPWLALGHINPFLRIAKQLADRGFVIYLCSTAINLESIKKRLPEKYSNSIHLVELHLPELPELPPHYHTTNGLPPHLNGTLKKALDMSAPNFSKILQNLKPDWVLYDFLQPWAEKVALEQGIPAVKLLTSGAALFSYFFHFLKLPGHEFPFPEIYLRKYEIVWMREMMGKEPKDEDFLAPGNAQIMLMCTSRVIEAKYMDYLSELTNWKVVPVGPVFQDPLTEDDDNPELIKWLDTQPENSVVFVSFGSEYFLSREDMQEVAFGLELSNVNFIWVARFPKGEEMRLEDALPKGFLERIGDRGRVLDHLVPQAKILAHPSTAGFVSHCGWNSVMESIDFGVPIIAMPMQWDQPINARLLVELGVAVEVVRDKDGKIHREEIAKTLKDVISGPTGEELRAKVRDISKLLRARREEEMEKAAEELIQLCRNRNAYK

SEQ ID NO: 1435 - protein, 440 aa, Artificial Sequence
  engineered beta-1,2-glycosyltransferase encoded in plasmid pA35583
QTLRVLMFPWLALGHINPFLRIAKQLADRGFVIYLCSTAINLESIKKRLPEKYSNSIHLVELHLPELPELPPHYHTTNGLPPHLNGTLKKALDMSAPNFSKILQNLKADLVLYDFLQPWAEKVALEHGIPAVCLLTSGAALFSYFFHFLKLPEHEFPFPAIYLRKYEQVYMREMMGKEPKDEDFLAPGNAQIMLMCTSRVIEAKYMDYLSELTNWKVVPVGPVFQDPLTEDDDNPELIKWLDTQPENSVVFVSFGSEYFLSREDMQEVAFGLELSNVNFIWVARFPKGEEINLEDALPKGFLERIGDRGRVLDHLVPQAKILAHPSTAGFVSHCGWNSVMESIDFGVPIIAMPMQWDQPINARLLVELGVAVEVVRDDDGKIHREEIAKTLKDVISGPTGEELRAKVRDISKRLRARREEEMNKAAEELIQLCRNRNAYK

SEQ ID NO: 1436 - protein, 440 aa, Artificial Sequence
  engineered beta-1,2-glycosyltransferase encoded in plasmid pA35584
QTLRVLMFPWLALGHINPFLRIAKQLADRGFVIYLCSTAINLESIKKRLPEKYSNSIHLVELHLPELPELPPHYHTTNGLPPHLNGTLKKALDMSAPNFSKILQNLKPDLVLYDFLQPWAEKVALEHGIPAVKLLTSGAALFSYFFHFLKLPEHEFPFPAIYLRKYEQVYMREMMGKEPKDEDFLAPGNAQIMLMCTSRVIEAKYMDYLSELTNWKVVPVGPVFQDPLTEDDDNPELIKWLDTQPENSVVFVSFGSEYFLSREDMQEVAFGLELSNVNFIWVARFPKGEEINLEDALPKGFLERIGDRGRVLDHLVPQAKILAHPSTAGFVSHCGWNSVMESIDFGVPIIAMPMQWDQPINARLLVELGVAVEVVRDDDGKIHREEIAKTLKDVISGPTGEELRAKVRDISKRLRARREEEMNKAAEELIQLCRNRNAYK

SEQ ID NO: 1437 - protein, 440 aa, Artificial Sequence
  engineered beta-1,2-glycosyltransferase encoded in plasmid pA35585
QTLRVLMFPWLALGHINPFLRIAKQLADRGFVIYLCSTAINLESIKKRLPEKYSNSIHLVELHLPELPELPPHYHTTNGLPPHLNGTLKKALDMSAPNFSKILQNLKPDWVLYDFLQPWAEKVALEQGIPAVKLLTSGAALFSYFFHFLKLPGHEFPFPAIYLRKYEIVKMREMMGKEPKDEDFLAPGNAQIMLMCTSRVIEAKYMDYLSELTNWKVVPVGPVFQDPLTEDIDNPELIKWLDTQPENSVVFVSFGSEYFLSREDMQEVAFGLELSNVNFIWVARFPKGEEMNLEDALPKGFLERIGGRGRVLDHLVPQAKILAHPSTGGFVSHCGWNSVMESIDFGVPIIAMPMQWDQPINARLLVELGVAVEVVRDDDGKIHREEIAKTLKDVISGPTGEELRAKVRDISKRLRARREEEMNKAAEELIQLCRNRNAYK

SEQ ID NO: 1438 - protein, 440 aa, Artificial Sequence
  engineered beta-1,2-glycosyltransferase encoded in plasmid pA35586
QTLRVLMFPWLALGHINPFLRIAKQLADRGFVIYLCSTAINLESIKKRLPEKYSNSIHLVELHLPELPELPPHYHTTNGLPPHLNGTLKKALDMSAPNFSKILQNLKPDWVLYDFLQPWAEKVALEQGIPAVKLLTSGAALFSYFFNFLKLPGHEFPFPAIYLRKYEQVKMREMMGKEPKDEDFLAPGNAQIMLMCTSRVIEAKYMDYLSELTNWKVVPVGPVFQDPLTEDIDNPELIKWLDTQPENSVVFVSFGSEYFLSREDMEEVAFGLELSNVNFIWVARFPKGEEMNLEDALPKGFLERIGDRGRVLDHLVPQAKILAHPSTGGFVSHCGWNSVMESIDFGVPIIAMPMQWDQPINARLLVELGVAVEVVRDDDGKIHREEIAKTLKDVISGPTGEILRAKVRDISKRLRARREEEMNAAAEELIQLCRNRNAYK

SEQ ID NO: 1439 - protein, 440 aa, Artificial Sequence
  engineered beta-1,2-glycosyltransferase encoded in plasmid pA35587
QTLRVLMFPWLALGHINPFLRIAKQLADRGFVIYLCSTAINLESIKKRIPEYYSNSIHLVELHLPSLPELPPHYHTTNGLPPHLNGTLKKAFDMSKPNFSKILQNLKPDLVLYDFLQPWAEKVANEQGIPAVCLLTSGAALFSYFFHFAKYPGNEFPFPAIYLRKYWQVYMREMMGKEPKDEDFCIPGNCQIMLMNTSRVIEAKYMDYLSELTNWKVVPVGPPFQDPLTEDVDDPELLKWLDKQPPNSVVFVSFGSEYFLSKEDMQEIAFGLELSNVNFIWVARFPKGEEMRLEDALPKGFLERVGGRGRVLDHLVPQAKILAHPSTGGFVSHCGWNSVMESIDFGVPIIAMPMQWDQPINARLLEELGVAVEIVRDEDGKIHREEIAKVLRDVISGPTGEELRAKVRDISERLRARREEEMDKAAEELEQLCRNRNAYK

SEQ ID NO: 1440 - protein, 440 aa, Artificial Sequence
  engineered beta-1,2-glycosyltransferase encoded in plasmid pA35588
QTLRVLMFPWLALGHINPFLRIAKQLADRGFVIYLCSTAINLESIKKRIPEYYSNSIHLVELHLPSLPELPPHYHTTNGLPPHLNGTLKKAFDMSKPNFSKILQNLKPDLVLYDFLQPWAEKVANEQGIPAVKLLTSGAALFSYFFHFAKYPGNEFPFPAIYLRKYWQVYMREMMGKEPKDEDFCIPGNAQIMLMNTSRVIEAKYMDYLSELTNWKVVPVGPPFQDPLTEDVDDPELLKWLDKQPENSVVFVSFGSEYFLSKEDMQEIAFGLELSNVNFIWVARFPKGEEMRLEDALPKGFLERVGGRGRVLDHLVPQAKILAHPSTGGFVSHCGWNSVMESIDFGVPIIAMPMQWDQPINARLLEELGVAVEIVRDEDGKIHREEIAKVLRDVISGPTGEELRAKVRDISERLRARREEEMDKAAEELEQLCRNRNAYK

SEQ ID NO: 1441 - protein, 440 aa, Artificial Sequence
  engineered beta-1,2-glycosyltransferase encoded in plasmid pA35589
QTLRVLMFPWLALGHINPFLRIAKQLADRGFVIYLCSTAINLESIKKRIPEYYSNSIHLVELHLPSLPELPPHYHTTNGLPPHLNGTLKKAFDMSKPNFSKILQNLKPDLVLYDFLQPWAEKVANEQGIPAVKLLTSGAALFSYFFHFAKYPGNEFPFPAIYLRKYWQVYMREMMGKEPKDEDFLIPGNAQIMLMCTSRVIEAKYMDYLSELTNWKVVPVGPPFQDPLTEDVDDPELLKWLDKQPENSVVFVSFGSEYFLSKEDMQEIAFGLELSNVNFIWVARFPKGEEMRLEDALPKGFLERVGGRGRVLDHLVPQAKILAHPSTGGFVSHCGWNSVMESIDFGVPIIAMPMQWDQPINARLLEELGVAVEIVRDEDGKIHREEIAKVLRDVISGPTGEELRAKVRDISERLRARREEEMDKAAEELEQLCRNRNAYK

SEQ ID NO: 1442 - protein, 440 aa, Artificial Sequence
  engineered beta-1,2-glycosyltransferase encoded in plasmid pA35590
QTLRVLMFPWLALGHINPFLRIAKQLADRGFVIYLCSTAINLESIKKRIPEKYSNSIHLVELHLPELPELPPHYHTTNGLPPHLNGTLKKALDMAAPNFSKILQNLKPDLVLFDFLQPWAEKVALEQGIPAVKLLTSGAALFSYFFNFTKKPGHEFPFPAIYYRKYWQVKMREMMGKEPKDEDFSAPWNCQIMLMCTSRVIEAKYIDYLSELTGWKVVPVGPPVQDPLTEDIDDPELIDWLDKKPENSVVFVSFGSEYFLSREDMEEVAFGLELSNVNFIWVARFPKGEEQNLEDALPKGFLERIGERGRVLDHLVPQAHILAHPSTGGFVSHCGWNSVMESLDFGVPIIAMPMQWDQPINARLLVELGVAVEIVRDDDGKIHREEIAQVLKDVIFGPTGEELRRKVREMSKRLRARRDEEMNKAAEELIQLCRNRNAYK

SEQ ID NO: 1443 - protein, 440 aa, Artificial Sequence
  engineered beta-1,2-glycosyltransferase encoded in plasmid pA35591
QTLRVLMFPWLALGHINPFLRIAKQLADRGFVIYLCSTAINLESIKKRIPEKYSNSIHLVELHLPELPELPPHYHTTNGLPPHLNGTLKKALDMAAPNFSKILQNLKPDLVLFDFLQPWAEKVALEQGIPAVKLLTSGAALFSYFFNFTKKPGHEFPFPAIYYRKYWQVKMREMMGKEPKDEDFSAPWNAQIMLMCTSRVIEAKYIDYLSELTGWKVVPVGPPVQDPLTEDIDDPELIDWLDKKPENSVVFVSFGSEYFLSREDMEEVAFGLELSNVNFIWVARFPKGEEQNLEDALPKGFLERIGERGRVLDHLVPQAHILAHPSTGGFVSHCGWNSVMESLDFGVPIIAMPMQWDQPINARLLVELGVAVEIVRDDDGKIHREEIAQVLKDVIFGPTGEELRRKVREMSKRLRARRDEEMNKAAEELIQLCRNRNAYK

SEQ ID NO: 1444 - protein, 440 aa, Artificial Sequence
  engineered beta-1,2-glycosyltransferase encoded in plasmid pA35592
QTLRVLMFPWLALGHINPFLRIAKQLADRGFVIYLCSTAINLESIKKRIPEKYSNSIHLVELHLPELPELPPHYHTTNGLPPHLNGTLKKAFDMSAPNFSKILQNLKPDLVLYDFLQPWAEKVALEQGIPAVMLLTSGAALFSYFFHFSKKPGNEFPFPAIYLRKYEQVHMREMMGKEPKDEDFCIPGNCQIMLMCTSRVIEAKYIDYLSELTNWKVVPVGPPFQDPLTEDIDDPRLIQWLDKKPPNSVVFVSFGSEYFLSKEDMEEVAFGLELSNVNFIWVARFPKGEEMNLEDALPKGFLERVGERGRVLDHLVPQAKILAHPSTGGFVSHCGWNSVMESIDFGVPIIAMPMQWDQPINARLLVELGVAVEIVRDDDGKIHREEIAQTLKDVISGPTGEELRAKVRDISKRLRARREEEMDKAAEELIQLCRNRNAYK

SEQ ID NO: 1445 - protein, 440 aa, Artificial Sequence
  engineered beta-1,2-glycosyltransferase encoded in plasmid pA35593
QTLRVLMFPWLALGHINPFLRIAKQLADRGFVIYLCSTAINLESIKKRIPEKYSNSIHLVELHLPELPELPPHYHTTNGLPPHLNGTLKKAFDMSAPNFSKILQNLKPDLVLYDFLQPWAEKVALEQGIPAVMLLTSGAALFSYFFHFSKKPGNEFPFPAIYLRKYEQVHMREMMGKEPKDEDFLIPGNAQIMLMCTSRVIEAKYIDYLSELTNWKVVPVGPPFQDPLTEDIDDPRLIQWLDKKPENSVVFVSFGSEYFLSKEDMEEVAFGLELSNVNFIWVARFPKGEEMNLEDALPKGFLERVGERGRVLDHLVPQAKILAHPSTGGFVSHCGWNSVMESIDFGVPIIAMPMQWDQPINARLLVELGVAVEIVRDDDGKIHREEIAQTLKDVISGPTGEELRAKVRDISKRLRARREEEMDKAAEELIQLCRNRNAYK

SEQ ID NO: 1446 - protein, 440 aa, Artificial Sequence
  engineered beta-1,2-glycosyltransferase encoded in plasmid pA35594
QTLRVLMFPWLALGHINPFLRIAKQLADRGFVIYLCSTAINLESIKKRIPEKYSNSIHLVELHLPELPELPPHYHTTNGLPPHLNGTLKKALDMSAPNFSKILQNLKPDLVLYDFLQPWAEKVALELGIPAVKLLTSGAALFSYFFNFTKKPGHEFPFPDIYLRKYEQVKMREMMGKEPKDEDFLAPGNAQIVLMCTSRVIEAKYIDYLSELTGWKVVPVGPPFQDPLTEDIDDPELIDWLDKKPENSVVFVSFGSEYFLSREDMEEVAFGLELSNVNFIWVARFPKGEEQNLEDALPKGFLERIGERGRVLDHLVPQAHILAHPSTGGFVSHCGWNSVMESIDFGVPIIAMPMQWDQPINARLLVELGVAVEIVRDDDGKIHREEIAQTLKDVISGPTGEELRAKVREISKRLRARREEEMNKAAEELIQLCRNRNAYK

SEQ ID NO: 1447 - protein, 440 aa, Artificial Sequence
  engineered beta-1,2-glycosyltransferase encoded in plasmid pA35595
STLRVLMFPWLALGHVNPFLRLAKKLADRGFYIYLCSTPINLNSIKKRLPEKYSDSIQLVELHLPELPDLPPHYHTTNGLPPHLNGTLKKALDMSAPNFSKILKNLKPDLLIYDFLQPWAEKVALSQNIPAVFLLTSGAALFAYFFHFVKKYANEFPFPEIRLSKREQDKMRYMFGTAPTDRDFKAEASNQIMLMCTSRIIEAKYIDYLTELYNKKVVPVGPLLQDPLTEDDDDKELIDWLNTQDKNSVVYVSFGSEYTLSKEDMEEIAFGLELSNVNFIWVARFPLGEEMNLEEALPKGFLERIGDRGWVLDHLVPQAKILAHSSMAGFVSHCGWNSVMESIAFGVPIIAMPMQWDQPINARLIVELGVAVEVVRDENGKIHREEIAQVIKDVIKGKTAEELRAKLRDISENLKLIRDEEMDEAAEELIQLCQNRNAYK

SEQ ID NO: 1448 - protein, 440 aa, Artificial Sequence
  engineered beta-1,2-glycosyltransferase encoded in plasmid pA35596
STLRVLMFPWLALGHVNPFLRLAKKLADRGFYIYLCSTPINLNSIKKRLPEKYSDSIQLVELHLPELPELPPHYHTTNGLPPHLNGTLKKALKMLAPNFSKILKNLKPDLIIYDFLQPWAEKLALSLNIPAVKLLTSGAALFSYFFHFVKNPEVEFPFPDISLSKRFQDKMRESFGTAPTIRDFKNEGSNQIMLMCTSRIIEAKYIDYLTKLTNWKVVPVGPPFQDPLTEDDDDKELIDWLDKKPENSVVYVSFGSEYFLSKEDMEEIAFGLELSNVNFIWVIRFPKGEEQNLEEALPKGFLERIGERGRVLDHLVPQAHILAHSSVGGFVSHCGWNSVMESWDFGVPIIAMPMQWDQPINARLIVELGVAVEIVRDEDGKIHREEIAQVIKDVIYGKTGEDLRKKVREIAEMFKKIRDEEMDAAAEELIQLCQNRNAYK

SEQ ID NO: 1449 - protein, 440 aa, Artificial Sequence
  engineered beta-1,2-glycosyltransferase encoded in plasmid pA35597
STLRVLMFPWLALGHVNPFLRLAKKLADRGFYIYLCSTPINLNSIKKRLPEKYSDSIQLVELHLPELPELPPHYHTTNGLPPHLNGTLKKALDMSAPNFSKILKNLKPDLLIYDFLQPWAEKVALSQNIPAVFLLTSGAALFAYFFHFVKKYANEFPFPEIRLSKREQDKMRYMFGTAPTDRDFKAEASNQIMLMCTSRIIEAKYIDYLTELYNWKVVPVGPLFQDPLTEDDDDKELIDWLNTQDENSVVYVSFGSEYFLSKEDMEEIAFGLELSNVNFIWVARFPLGEEMNLEEALPKGFLERIGGRGWVLDHLVPQAHILAHSSMAGFVSHCGWNSVMESIMFGVPIIAMPMQWDQPINARLIVELGVAVEVVRDENGKIHRGEIAQVIKDVIVGKTGENLRAKVRDISENLKLIRDEEMDEAAEELIQLCQNRNAYK

SEQ ID NO: 1450 - protein, 440 aa, Artificial Sequence
  engineered beta-1,2-glycosyltransferase encoded in plasmid pA35598
STLRVLMFPWLALGHVNPFLRLAKKLADRGFYIYLCSTPINLNSIKKRLPEKYSDSIQLVELHLPELPELPPHYHTTNGLPPHLNGTLKKALKMSAPNFSKILKNLKPDLIIYDFLQPWAEKVALSLNIPAVKLLTSGAALFSYFFHFVKNPEVEFPFPSIRLSKRFQDKMREMFGTAPTRRDFLAEGSNQIMLMCTSRIIEAKYIDYLTELTNWKVVPVGPPFQDPLTEDDDDKELIDWLDKKDENSVVYVSFGSEYFLSKEDMEEIAFGLELSNVNFIWVIRFPKGEEQNLEEALPKGFLERIGERGRVLDHLVPQAHILAHSSTGGFVSHCGWNSVMESLDFGVPIIAMPMQWDQPINARLIVELGVAVEIVRDENGKIHREEIAQVIKDVIYGKTGEDLRKKVREIAEKLKKIRDEEMDAAAEELIQLCQNRNAYK

SEQ ID NO: 1451 - protein, 440 aa, Artificial Sequence
  engineered beta-1,2-glycosyltransferase encoded in plasmid pA35599
STLRVLMFPWLALGHVNPFLRLAKKLADRGFYIYLCSTPINLNSIKKRLPEKYSDSIQLVELHLPELPELPPHYHTTNGLPPHLNGTLKKALKMSAPNFSKILKNLKADLLIYDFLQPWAEKVALSQNIPAVFLLTSGAALFSYFFHFVKKYANEFPFPAIRLSKREQDKMRYMFGTAPTIRDFLAEASCQIMLMCTSRIIEAKYIDYLTELYNWKVVPVGPLFQDPLTEDDDDKELIDWLNTQDENSVVYVSFGSEYFLSKEDMEEIAFGLELSNVNFIWVARFPKGEEMNLEEALPKGFLERIGGRGRVLDHLVPQAHILAHSSTAGFVSHCGWNSVMESIMFGVPIIAMPMQWDQPINARLIVELGVAVEVVRDENGKIHRGEIAQVIKDVIVGKTGENLRAKVRDISENLKLIRDEEMDAAAEELIQLCQNRNAYK

SEQ ID NO: 1452 - protein, 440 aa, Artificial Sequence
  engineered beta-1,2-glycosyltransferase encoded in plasmid pA35600
STLRVLMFPWLALGHVNPFLRLAKKLADRGFYIYLCSTPINLNSIKKRLPEKYSDSIQLVELHLPELPELPPHYHTTNGLPPHLNGTLKKALKMSAPNFSKILKNLKPDLLIYDFLQPWAEKVALSQNIPAVFLLTSGAALFSYFFHFVKKYANEFPFPAIRLSKREQDKMRYMFGTAPTIRDFLAEASNQIMLMCTSRIIEAKYIDYLTELYNWKVVPVGPLFQDPLTEDDDDKELIDWLNTQDENSVVYVSFGSEYFLSKEDMEEIAFGLELSNVNFIWVARFPKGEEMNLEEALPKGFLERIGGRGRVLDHLVPQAHILAHSSTAGFVSHCGWNSVMESIMFGVPIIAMPMQWDQPINARLIVELGVAVEVVRDENGKIHRGEIAQVIKDVIVGKTGENLRAKVRDISENLKLIRDEEMDAAAEELIQLCQNRNAYK

SEQ ID NO: 1453 - protein, 440 aa, Artificial Sequence
  engineered beta-1,2-glycosyltransferase encoded in plasmid pA35601
STLRVLMFPWLALGHVNPFLRLAKKLADRGFYIYLCSTPINLNSIKKRLPEKYSDSIQLVELHLPELPELPPHYHTTNGLPPHLNGTLKKALKMSAPNFSKILKNLKPDLIIYDFLQPWAEKVALSLNIPAVKLLTSGAALFSYFFHFVKNPEVEFSFPAIRLSKREQDKMREMFGTAPTRRDFLAEGSCQIMLMCTSRIIEAKYIDYLTELTNWKVVPVGPPFQDPLTEDDDDKELIDWLDKKDENSVVYVSFGSEYFLSKEDMEEIAFGLELSNVNFIWVIRFPKGEEQNLEEALPKGFLERIGERGRVLDHLVPQAHILAHSSTGGFVSHCGWNSVMESWDFGVPIIAMPMQWDQPINARLIVELGVAVEIVRDENGKIHREEIAQVIKDVIYGKTGENLRAKVREISEMLKLIRDEEMDAAAEELIQLCQNRNAYK

SEQ ID NO: 1454 - protein, 440 aa, Artificial Sequence
  engineered beta-1,2-glycosyltransferase encoded in plasmid pA35602
STLRVLMFPWLALGHVNPFLRLAKKLADRGFYIYLCSTPINLNSIKKRLPEKYSDSIQLVELHLPELPELPPHYHTTNGLPPHLNGTLKKALKMSAPNFSKILKNLKPDLIIYDFLQPWAEKVALSLNIPAVKLLTSGAALFSYFFHFVKNPEVEFPFPAIRLSKREQDKMREMFGTAPTRRDFLAEGSNQIMLMCTSRIIEAKYIDYLTELTNWKVVPVGPPFQDPLTEDDDDKELIDWLDKKDENSVVYVSFGSEYFLSKEDMEEIAFGLELSNVNFIWVIRFPKGEEQNLEEALPKGFLERIGERGRVLDHLVPQAHILAHSSTGGFVSHCGWNSVMESWDFGVPIIAMPMQWDQPINARLIVELGVAVEIVRDENGKIHREEIAQVIKDVIYGKTGENLRAKVREISEMLKLIRDEEMDAAAEELIQLCQNRNAYK

SEQ ID NO: 1455 - protein, 440 aa, Artificial Sequence
  engineered beta-1,2-glycosyltransferase encoded in plasmid pA35603
STLRVLMFPWLALGHVNPFLRLAKKLADRGFYIYLCSTPINLNSIKKRIPEKYSDSIQLVELHLPELPELPPHYHTTNGLPPHLNGTLKKALDMSAPNFSKILKNLKPDLLIYDFLQPWAEEVALSQNIPAVKLLTSGAALFSYFFHFSKKPKIEFPFPAIRLGKRERWKMRQSFGTEPTDRDFLANGSNQIMLMCTSRIIEAKYIDYLRELYNWKVVPVGPPFQDPLTEDDDDMELIDWLDKKDENSTVYVSFGSEYFLSKEQMEEIAFGLELSNVNFIWVARFPKGEEQNLEEALPKGFLERIGERGRVLDHLVPQAKILAHSSTGGFVSHCGWNSVMESIYFGVPIIAMPMQWDQPINARLIVELGVAVEIVRDENGKIHREEIAQVIKDVIVGKEAENLRAKVRDISEKLKLIRDEEMDEAAEELIQLCQNRNAYK

SEQ ID NO: 1456 - protein, 440 aa, Artificial Sequence
  engineered beta-1,2-glycosyltransferase encoded in plasmid pA35604
STLRVLMFPWLALGHVNPFLRLAKKLADRGFYIYLCSTPINLNSIKKRIPEKYSDSIQLVELHLPELPELPPHYHTTNGLPPHLNGTLKKALDMSAPNFSKILKNLKPDLLIYDFLQPWAEEVALSQNIPAVCLLTSGAALFSYFFHFSKKPKIEFPFPAIRLGKRERWKMRQSFGTEPTDRDFLANGSCQIMLMCTSRIIEAKYIDYLRELYNWKVVPVGPPFQDPLTEDDDDMELIDWLDKKDENSTVYVSFGSEYFLSKEQMEEIAFGLELSNVNFIWVARFPKGEEQNLEEALPKGFLERIGERGRVLDHLVPQAKILAHSSTGGFVSHCGWNSVMESIYFGVPIIAMPMQWDQPINARLIVELGVAVEIVRDENGKIHREEIAQVIKDVIVGKEAENLRAKVRDISEKLKLIRDEEMDEAAEELIQLCQNRNAYK

SEQ ID NO: 1457 - protein, 440 aa, Artificial Sequence
  engineered beta-1,2-glycosyltransferase encoded in plasmid pA35605
STLRVLMFPWLALGHVNPFLRLAKKLADRGFYIYLCSTPINLNSIKKRIPEKYSDSIQLVELHLPELPELPPHYHTTNGLPPHLNGTLKKAFDMSAPNFSKILKNLKPDLLIYDFLQPWAEKVALSQNIPAVHLLTSGAALFSYFFHFLKKPGIEFPFPAIRLGKREQDKMRESFGTEPTDRDFRAEGSNQIILMCTSRIIEAKYIDYLRELYNWKVVPVGPPFQDPLTEDDDDMRLIDWLDKKDENSTVYVSFGSEYFLSKEDMEEIAFGLELSNVNFIWVARFPKGEEQNLEEALPKGFLERIGERGRVLDHLVPQAKILAHSSTGGFVSHCGWNSVMESIAFGVPIIAMPMQWDQPINARLIVELGVAVEIVRDENGKIHREEIAQVIKDVIRGKNGENLRAKVRDISEKLKLIRDEEMDEAAEELIQLCQNRNAYK

SEQ ID NO: 1458 - protein, 440 aa, Artificial Sequence
  engineered beta-1,2-glycosyltransferase encoded in plasmid pA35606
STLRVLMFPWLALGHVNPFLRLAKKLADRGFYIYLCSTPINLNSIKKRIPEKYSDSIQLVELHLPELPELPPHYHTTNGLPPHLNGTLKKAFDMSAPNFSKILKNLKPDLLIYDFLQPWAEKVALSQNIPAVHLLTSGAALFSYFFHFVKKPGVEFPFPAIRLGKREQDKMREEFGTEPTDRDFLAEGSNQIILMCTSRIIEAKYIDYLTELYNWKVVPVGPPFQDPLTEDDDDKRLIDWLDTKDENSTVYVSFGSEYFLSKEDMEEIAFGLELSNVNFIWVARFPKGEEQNLEEALPKGFLERIGERGRVLDHLVPQAHILRHSSTGGFVSHCGWNSVMESIAFGVPIIAMPMQWDQPINARLIVELGVAVEIVRDENGKIHRGEIAQVIKDVIVGKTGENLRAKVRDISEKLKLIRDEEMDAAAEELIQLCQNRNAYK

SEQ ID NO: 1459 - protein, 440 aa, Artificial Sequence
  engineered beta-1,2-glycosyltransferase encoded in plasmid pA35607
STLRVLMFPWLALGHVNPFLRLAKKLADRGFYIYLCSTPINLNSIKKRIPEKYSDSIQLVELHLPELPELPPHYHTTNGLPPHLNGTLKKALKMAAPNFSKILKNLKPDLLIYDFLQPWAEKVALSQNIPAVKLLTSGAALFSYFFHFVKKPGVEFPFPEIRLSKRYQDKMREMFGTEPTDRDFLAEGSNQIMLMCTSRIIEAKYIDYLTELTNWKVVPVGPPFQDPLTEDDDDKELIDWLDKKDENSVVYVSFGSEYFLSKEDMEEIAFGLELSNVNFIWVARFPKGEEQNLEEALPKGFLERIGERGRVLDHLVPQAHILAHSSTGGFVSHCGWNSVMESIDFGVPIIAMPMQWDQPINARLIVELGVAVEIVRDENGKIHREEIAQVIKDVIYGKTGENLRAKVREISENLKLSRDEEMDKAAEELIQLCQNRNAYK

SEQ ID NO: 1460 - protein, 440 aa, Artificial Sequence
  engineered beta-1,2-glycosyltransferase encoded in plasmid pA35608
STLRVLMFPWLALGHVNPFLRLAKKLADRGFYIYLCSTPINLNSIKKRIPEKYSDSIQLVELHLPELPELPPHYHTTNGLPPHLNGTLKKALDMSAPNFSKILKNLKPDLLIYDFLQPWAEKVALSQNIPAVKLLTSGAALFSYFFHFVKKPGVEFPFPAIRLGKREQDKMREEFGTEPTDRDFLATGSCQIMLMNTSRIIEAKYIDYLTELMNWKVVPVGPPFQDPLTEDDDDKELIDWLDTKDENSTVYVSFGSEYFLSKETMEEIAFGLELSNVNFIWVARFPKGEEQNLEEALPKGFLERIGERGRVLDHLVPQAKILAHSSTGGFVSHCGWNSVMESIYFGVPIIAMPMQWDQPINARLIVELGVAVEIVRDENGKIHRGEIAQVIKDVIVGKTAENLRAKVRDISEKLKLIRDEEMDEAAEELIQLCQNRNAYK

SEQ ID NO: 1461 - protein, 440 aa, Artificial Sequence
  engineered beta-1,2-glycosyltransferase encoded in plasmid pA35609
STLRVLMFPWLALGHVNPFLRLAKKLADRGFYIYLCSTPINLNSIKKRIPEKYSDSIQLVELHLPELPELPPHYHTTNGLPPHLNGTLKKALDMSAPNFSKILKNLKPDLLIYDFLQPWAEKVALSQNIPAVKLLTSGAALFSYFFHFVKKPGVEFPFPAIRLGKREQDKMREEFGTEPTDRDFLATGSNQIMLMCTSRIIEAKYIDYLTELMNWKVVPVGPPFQDPLTEDDDDKELIDWLDTKDENSTVYVSFGSEYFLSKETMEEIAFGLELSNVNFIWVARFPKGEEQNLEEALPKGFLERIGERGRVLDHLVPQAKILAHSSTGGFVSHCGWNSVMESIYFGVPIIAMPMQWDQPINARLIVELGVAVEIVRDENGKIHRGEIAQVIKDVIVGKTAENLRAKVRDISEKLKLIRDEEMDEAAEELIQLCQNRNAYK

SEQ ID NO: 1462 - protein, 440 aa, Artificial Sequence
  engineered beta-1,2-glycosyltransferase encoded in plasmid pA35610
STLRVLMFPWLALGHVNPFLRLAKKLADRGFYIYLCSTPINLNSIKKRIPEKYSDSIQLVELHLPELPELPPHYHTTNGLPPHLNGTLKKALKMAAPNFSKILKNLKPDLLIYDFLQPWAEKVALSLNIPAVKLLTSGAALFWYFFHFVKKPGVEFPFPAIRLSKRWQDKMREMFGTEPTDRDFRAEGSNQIMLMCTSRIIEAKYIDYLTELTNWKVVPVGPPFQDPLTEDDDDKELIDWLDKKDENSCVYVSFGSEYFLSKEDMEEIAFGLELSNVNFIWVARFPKGEEQNLEEALPKGFLERIGERGRVLDHLVPQAHILAHSSTGGFVSHCGWNSVMESIDFGVPIIAMPMQWDQPINARLIVELGVAVEIVRDENGKIHREEIAQVIKDVIVGKTGENLRAKVREISEKLKLKRDEEMDKAVEELIQLCQNRNAYK

SEQ ID NO: 1463 - protein, 440 aa, Artificial Sequence
  engineered beta-1,2-glycosyltransferase encoded in plasmid pA35611
STLRVLMFPWLALGHVNPFLRLAKKLADRGFYIYLCSTPINLNSIKKRIPEKYSDSIQLVELHLPELPELPPHYHTTNGLPPHLNGTLKKALKMSAPNFSKILKNLKPDLLIYDFLQPWAEKVALSQNIPAVHLLTSGAALFSYFFHFVKKPGVEFPFPAIRLGKREQDKMREMFGTEPTDRDFLAEGSCQIILMNTSRIIEAKYIDYLTELYNWKVVPVGPPFQDPLTEDDDDKRLIDWLGTKDENSTVYVSFGSEYFLSKEDMEEIAFGLELSNVNFIWVARFPKGEEQNLEEALPKGFLERIGERGRVLDHLVPQAHILRHSSTGGFVSHCGWNSVMESIDFGVPIIAMPMQWDQPINARLIVELGVAVEIVRDENGKIHRGEIAQVIKDVIVGKTGENLRAKVRDISENLKLIRDEEMDAAAEELIQLCQNRNAYK

SEQ ID NO: 1464 - protein, 440 aa, Artificial Sequence
  engineered beta-1,2-glycosyltransferase encoded in plasmid pA35612
STLRVLMFPWLALGHVNPFLRLAKKLADRGFYIYLCSTPINLNSIKKRIPEKYSDSIQLVELHLPELPELPPHYHTTNGLPPHLNGTLKKALKMSAPNFSKILKNLKPDLLIYDFLQPWAEKVALSQNIPAVHLLTSGAALFSYFFHFVKKPGVEFPFPAIRLGKREQDKMREMFGTEPTDRDFLAEGSNQIILMCTSRIIEAKYIDYLTELYNWKVVPVGPPFQDPLTEDDDDKRLIDWLGTKDENSTVYVSFGSEYFLSKEDMEEIAFGLELSNVNFIWVARFPKGEEQNLEEALPKGFLERIGERGRVLDHLVPQAHILRHSSTGGFVSHCGWNSVMESIDFGVPIIAMPMQWDQPINARLIVELGVAVEIVRDENGKIHRGEIAQVIKDVIVGKTGENLRAKVRDISENLKLIRDEEMDAAAEELIQLCQNRNAYK

SEQ ID NO: 1465 - protein, 440 aa, Artificial Sequence
  engineered beta-1,2-glycosyltransferase encoded in plasmid pA35613
STLRVLMFPWLALGHVNPFLRLAKKLADRGFYIYLCSTPINLNSIKKRIPEKYSDSIQLVELHLPELPELPPHYHTTNGLPPHLNGTLKKALDMSAPNFSKILKNLKPDLLIYDFLQPWAEKVALSQNIPAVKLLTSGAALFSYFFHFVKKPGVEFPFPAIRLGKREQDKMREMFGTEPTDRDFLATGSNQIMLMCTSRIIEAKYIDYLTELMNWKVVPVGPPFQDPLTEDDDDKELIDWLGTKDENSTVYVSFGSEYFLSKETMEEIAFGLELSNVNFIWVARFPKGEEQNLEEALPKGFLERIGERGRVLDHLVPQAHILRHSSTGGFVSHCGWNSVMESIDFGVPIIAMPMQWDQPINARLIVELGVAVEIVRDENGKIHRGEIAQVIKDVIVGKTGENLRAKVRDISENLKLIRDEEMDAAAEELIQLCQNRNAYK

SEQ ID NO: 1466 - protein, 440 aa, Artificial Sequence
  engineered beta-1,2-glycosyltransferase encoded in plasmid pA35614
STLRVLMFPWLALGHVNPFLRLAKKLADRGFYIYLCSTPINLNSIKKRIPEKYSDSIQLVELHLPELPELPPHYHTTNGLPPHLNGTLKKALKMSAPNFSKILKNLKPDLLIYDFLQPWAEKVALSQNIPAVKLLTSGAALFWYFFHFVKKPGVEFPFPAIRLSKREQDKMREMFGTEPTDRDFLAEGSNQIMLMCTSRIIEAKYIDYLTELMNWKVVPVGPPFQDPLTEDDDDKELIDWLDKKDENSTVYVSFGSEYFLSKEDMEEIAFGLELSNVNFIWVARFPKGEEQNLEEALPKGFLERIGERGRVLDHLVPQAHILNHSSTGGFVSHCGWNSVMESIDFGVPIIAMPMQWDQPINARLIVELGVAVEIVRDENGKIHREEIAQVIKDVIVGKTGENLRAKVRDISENLKLRRDEEMDAAAEELIQLCQNRNAYK
